United States Patent Application Publication US 2022/0008368 A1 - sequence listing, part 18

SEQ ID NO: 2 - DNA, 58617616 bp, Homo sapiens (residues 36,907,392-39,078,414 of 58,617,616)
  modified_base (1)..(60000): a, c, t, g, unknown or other
  modified_base (24448981)..(24498980): a, c, t, g, unknown or other
  modified_base (24552653)..(24552752): a, c, t, g, unknown or other
  modified_base (24891257)..(24891356): a, c, t, g, unknown or other
  modified_base (24895791)..(24895890): a, c, t, g, unknown or other
  modified_base (24898314)..(24904771): a, c, t, g, unknown or other
  modified_base (24908590)..(24908689): a, c, t, g, unknown or other
  modified_base (27190875)..(27240874): a, c, t, g, unknown or other
  modified_base (58607617)..(58617616): a, c, t, g, unknown or other
ggtgctagtaatgttctatttatcgtcctagtagtggtttcaccattctcaatttcaccatactatgcaatcatagtcatgcagttttatgtgtgtatgttatacttcaattttgttttcaagtaagaaataatcaaatgtttgataaatgaaagaatgagcttttaaatccagaacaaactggtcaaagatgttaaatagctgaaagtagataaaatgaaaacaagcacagggaaagaaaaagacacacatgcacttacatctatttctcagggtgggaatgtctactgttatacaaatctaaacgtagcgtatcataggaaggaatgaaactaaaatgtgactagaataattatagcataattgtagccagggaggtacttgctatattggactagggaaaaagtatgagaaaaaaaaaaaaagtgggatagcttatatggaagaggcttcaggcctttaaagggagcttcctgataacatctcagaagtatatctctttatagccctgctcctgagccatcatctcttacttacctgaacacaggcctctagtcagctctctatcaaccatccagggctcttttccttgttccaataaggagatcacagctggcttagaattggaaagtcctgttcacaagaaaagacatgggacatggttatgctgtggggtccccagaaatcagatccagtcccttagtgatcaaaggagagatgccactacaagaaggaccggagaaagatggagaagatgaagcttcagccacagcccattggagctgcccacttccaactcttccattctattttaactcaaaccattccttagggaacagggagcagaaattcagctggttacatgaagcaaataattcacaatggagaaaggagacacttccaagggcacactctgaattttggggaatagttatccttacccactgaaaccaggttgctgaaattctccaacatcacttctttgtataaattcatctgatcagcgtccaggcattcccattcctcttgagagaagtctatggaaacatccctgaacatcaccggcccctgaaacaacaaacatgctttcacaatgaaaggagaaaagaaaaagatggcggtagaggtggcaagaaaggacagagtaagcaaaattaaagggggtgaatcctatcatatcagaagatatacgtcctgtgtacaaagggatatacaaatagactggacttttccagtgatatgaaatagcatgcattcagctcaattagtgagtttcttccccctccccgctttccctttatgccccaagagaggggaaaatgggaggggctttcaaacacaccttataatacatggagtaaaaattcagaatatcaggggaaaacaaaaatgaaagtttctaaaagcttccagaagaaaacacagatcacataagttttcagaaatcagaatggcaatagacttctcaatagcatcatttgaaataagaaaaaaccaagcaattcctttaatattataaaggaaaataaattctgacctagaattctatagccagtcagattactaagccactatgaagattaaatcaagacaattttaaatctgcagggaatgataaaagtacttccaatgtggcttttcttaggaagctactaggctacatgttccatcaaaactaggtagtaaattaggaaaaagaaaaggtactatattaagaaactgtaaaactaacatgaaaatggtgatgaaagtgccagtataattataaaaggcaaatcctagaacatcatccggcagcagactgagagaacagcatctaggaacagaagaagtgaggactataggaaagacatctccaaagaaaactaaggagctagtatgtttcatcatgtagaaaatattgacaggcaactgacagcaatgttagagaatttgaaaaaaatagtgacacatacataaaaccgggcaaaagaagaaacaaggcaatttcctctgagaaaaatacaaattgtattagaaagaatccagaatctggtgttttacttggctcacattgtctgcaaggtcctaatgtctgcaacaatgtctgcaaggtcctaatcacagggatagcaatgattgaaagaaaaattatgagccgagcatggtggctcatgcctgtaatcccagcactttgggaggccgaggcaggaggatcaccaggtcaggagttcgagaccagcctggccaacatgatgaaaccccgtgtctacttaaaatacaaaaattagctgggcgtggtggtgcacgcctgtaatcctagctactcgggaggctgaggtaggagaatcacttgaacctgggaggcggaggttgcagtgagccaagattgcgccactgcactccagcctgggcaacagagtgagactctgtctcaaaaaaaaaaaaaagaaagaaagaaaagaaaaattgtgatataattctattgcatggacaaaaaatgaagactgtggtatgggaaatctcaatccatagttacctgcctagaaatcactggaaaatatgtatcaaaaaatagcaatataggaatattaattagaaatataggaaaaatgctaagagaaacagcaaaaagagtagccacctaaggggagtaggattgggttagtgggacaatgccctgccatttttcatgtcttttaacatttcttgaaaaattttttttttttttgagacggagtttcgctcttgttgcccaggttggagtgcagtggcacaatctcggctcactgcaacctccacctcccgggttcaagcgattctcctccttcagcctcccgagtagctgggattacaggcgccggtcaccacacccagctaatttttgtatttttagtagagacagggtttcaccatgctggtcaggctggtctcaaactcctgacctcaagtgatccacctgcctcagcctcccaaagtgctgggatgacaggcgtgagccaccacgcctggcccatttcttgaatttttaaaatgcgaaatgggttaaacataaatttaaagtatcacttagacaacagcatactttaagtttcttggaaattacaattcttataagactgtcataattattccctattaacataaacaaattcaacttttatacccttatggtagcagaaatttccacaatataaatactactgaatgaatctttcatttcagacattttcttaggcaaaaatacttttaagaccttttccagatatgcaggcccttccccataccttgccctatgcatctcttccattttgctgttccttagttgtatcctttgtaataaaactataatcaggccgggtgcggtagctcatgcctgtaattccagcactttgggaagccaaggggggtggatcacctgaggtcaggagtttgtgaccagcctagccaacatggagaaaccccatctttactaaaaatacaaaaaatagccaggtgtcgtggcgcatgcctgtaatcccagctactcagaaggccaaggcaggagaattgcttgaacccgggaggcggaggttgcagtgagccgagattgtgccgttgcactccagcctggacaacagagtgaaacgccatctcaaaaccaacaaacaaagaaaccaacaaaaaagtaaaactatcatcataagtatagtgctttcctgagttctatatgttattctaatgaattattgaacctgaaggagagttacgggaacctctaaatttttggctggctaggcagaagtgcagtgccttagacttgtggctggtgtctgaagcaggtacagtcttgtgggactgagtcttttttttttttctttgagactgagtctactccatcacccaggctggagtgcagtggtgcgatctcagctccctgcaacctctgcctcccaggtttaagcaatgcttctgcctcagcctcctgagtagctgggaccacaggcacacaccaccacatccagctaatttttgtatttttagtagagatgtgggttcaccatgttgtccaggctgttctcaaactcctgacctcaagtgatcctcccatctcggcctcccaaagtcctgggattataggcatgaccagctgggactgagcctcttaagcaatggggtctatgttaactctgggtagtgtcagaattcagttaaactataggacactcagttagtgtcccaaaaattttgtttataaaaggacacacattcccaattgataggagaaatgagggtacttctccctcaccttaggacaagcaagggggcccctttagactccagggtccaaagtggaatgatgagatactttggaataatttttgctgtattctctggagcttagggggcacaaagattagtacctatttccctctttggactagatgtggacccaataaagggacaaagtgacctcaacaaaggaatggatcacagaatgcagaagtgtatgacagatgtcataagtagccatttcaagaagacatgctgtgcatatcccaggaaatgcaattagaggtttccagcaggggcttctctgagagactcttaatagtgtctcctaacaaaggagtgttgaacatccatcaaggcaaaagagatcaacaccaaaacaagtcaagaaagacttttcttttccttacctcctcttccctacccctgctctaatctcataggatccagagactgacttaggcaggagaaatagaagctcagggcgaggaaatcaagaagcttaattatgtcccttttcatactttgcaagcttgaagcaattctcagctcagagaagaggctttaaatgaaactcacatattattacagtgaactagaggttgtaattagtaaaatgagactagattttgactgaaaacaatcaaaggacatcaaagagtgataaaaattatagtctataccagttcttatccagggcaacaaaaaaattaacccacagagagggttgagagtagaaattatgaggaaaaagtttttcttttgcttgcttcatatggaatcctgcttatttcaaaatgctgatcacaagcagatttggtttttcagttacacagtcacatcatctataaagcgataatcttatgccctcttttgtaatttttaacctaattttttttcttatgtaagtgttttggttaatatctataaaacaatgttaaataacattggtaatgtggtatatccttgttttacttctaattttcaaatattttgatgtttcaaatatttcctgattaaacattagattaagttctgaaaacaaattttatttcttttaaaatttattgtcccccgggcacagtggctcatgcctgtaatcccagcactttgggaggccgagatgggcagatcacctgaggttgggagttcaagaccagcctgaccagcatggagaaacaccgtctctactaaaaatacaaaaattagccgggcgtagtggcgcatgcctgtaatcccagctactcgggaggctgaggcaggagaatcgcttgaacccaggaggtggaggttgtggtgagccgagatcatgccattgtgctccagcctgggaaacaagagtgaaactctgtcccaaaaaaaataaaaatttattgtctactacagtatactacatgtccctagttattcccgttaatactgggcaacaatcttctctatagaaatgagaagtgtaactagagactgatgcaagaggggaagcagatattctatttgggctttggcacaggagagggaagactcagtcctctttaaaagaaattcagatagaaaggccttacacaaaatacttagttagacttattcttatcctgattttctctgcatctgtaccaaacacatacaatttaaaaattgagagtaggcccactcagagttccaaatttacaccttgagaaaacattgtcactattctgagtcctctatcctagtatgtatcctctaattttcagataaaatgattacctggtgaatggataaccttacaatttagtgagttccccaagattagaagtgttgaaacacaaactgaataaagatatttttattattacttggaggaagaatccaaaaactctgtaattgcctgccatgcccactgccccctcctgagatgaggcaaggttcttttgtttgctttgatttcagctataagtatcaactctaaaaaccaaaaagagataagacacagaaaagaagaagaaattctaacatatgtttagttagaacctgagaaggaaagggggagagaatgatacgggggctttttgaaggtataatgactgaagattttcctgaactaataatagatatccatccataaattttaaaactctacaaatcccaagcagacaaataaaacacatttatatatcttacactaaaattacagaaagccaaaaacaaaacagtcagaggaagacaaggcagattaccatcaagggagacgagctaatcaagactgtatgatactggcacaggaatataaaaaatcagtggaagagaataaagagttcataaacatacccatgcacatatagacactaggtatatttgaagaccaatgagaacacaatagaccttccaatatatggtattgataaactgggtattaataaggaggggggaatctgactcttacctcataacatatacaaaaaccagttgcaactatataaaatatctaaacatgaaagtgaaacttatggctttaagcataaatataggagagtatctgcatgaccttgggacagggaaggatttatttaaaaagatacaaaaagcactaaccataaagaaaaaatattgataaactcagctttttaaaaattagaacttatcataaaatcatcttacaggaaatgatgaaatagtccaaatagtaggaaaacaatcaataaaggactgagatccagattacataaataactcatacgaatcaataagagctattccaagagaaaaatgagtaaagatttgaactgacatgtcacaaaagatgactaaaaaccaataaacatatggaatatgttcaattttattattaatcacggaaacccaaattcaaacctgtgggggtgggcgggtataagtacagatatatattcaaatgaggatttaaaagtctggcatgtctgatttgtatatcatagtttttgcaaacatcaaaaatgtatttcccaagaccatttgatgacatgggagaatatttctgacacttctttttgcaaaaatgtagaacatcaaatggtaaatgaaataaaatttggtttttgacaaataatgaaaatacattaaaatattaaccctagttatctgagtggctaaattttattttttcttggtaatgctgtgtttttgagatctctaaattaatcatccttttatttttaaatcagaataaatatttgagaagaaaattcagcaagcataagtggagcaaccatccttttctgtgatgggaaaattatagggacctataattaaatgacattcctttaagcaagaattttcagaagaaaaagaggaaaccccaacacaccttggatactgcttgtagaagttcatcatgcattctttcctcctcttctgggtgacacctggagaaaggtaaaattgggagagggaagagtaactgtgagacaccaggtttttcttggtacccagattagtcaagtaagagttcttccccagccccattacccaccacacatgaggaatggagatcagaggagaatggggcattctgtccaattccagtggctcaggggaaaggttgtgttcactgctgtccagggttggaatctgaccagacctcagagaggtttcctagagacagagttctggagtcacaatcgcatagttgacaggaccccatactcatacacagaatgccacatacatttagggacagtcacacttaaggcgacatgcacgtctcacctgcccacaaggagccacacacggcaacacagttacaatcacatacacaccataggaaacacacaattacagctgcacaatcgtaggcaccccacactgtcgcagagtcacaatcacacatcaccacgggaacacacagccacaacccccacagtgacaggtatcccatatccgcacataagccgcagtgttattatctcccagacaatttcacaacctcccctctttttttgggggggtggggtggggtggggacagagtcttgccctgtcgccaggctggagtgcagtggtgcgatctcggctcactgcaacctccgcctcccgggttcaagtgattctcctgcctcagcctgcgagtagctgggattacaggcgcgcgccaccatgcctagctaatttttgtatttttagtagagatggggtttcaccatgttggccaggatggtctcgatctcttgacctcgtgatcctcctgcctcggcctcccaaacacaacctccacctttcaggccgctccgcccgcaggggcccaaggcgccagctccccatcggtcttcggtatcctcacctaagccctttccagtcatcccggatgggaacttgcagacctgagccagttctcctggggaccaaaatatctcacctcccagatctaagggtcccgccaggagtgacgaaacgttcgaattcctgcgagaaaagtggcaggccaccaggccctctgggaaatgtagtccagagcgggacccacgccgattcctgtcagctcctcgcctgggcccacccgaaacggctgctccctcaactctcaacatccagccgagcctcggagttgcgggtcgccgtagcgctgcgcaatggagatgagcctcccggggaacccggcccaagcctcaccctcacacaggaaagcagatgtgttctggccggaagttgagtggggccgcggggcctgctgggaggtgttgtcctcggaaacgtcgctggcgcggagggatggttcggcgctttaggcgtctgtcacagacctatctgcgggtcgccttcacccagcatctcagaaactgcgcgcgggatgaacattcgggtgtttccggcaggtgacgctgccgagtccccgcagcagggggcgagcaagggactcgcggttgacgggacacggatcctctaaggcccagagtgtcccgagtagcggcagtggggagtgctcagggtacgctaatggtgagtggttgcagttgatgggacaaaaaactgtgatgggagttagtgtgggtgtgtggttgtgtgtgtgagtgtgacggcacgaataatctgatggggtgattgtgatatttggttgcgcgggattatgatgaaatgtgtgatatgtgtgtgattatgattaaggctgtagcgagtgtgaacgtggcgaagtgtgcgtgattgtaatatgtctagtagttcttgtcttgagctggcttttctgtagcatttggcacagttggtaacggcttgaaaaacacttatttgttttctactgatcctccctccttgttggccactcctctgtagtcttctttgctgtcttttttaccctagtagcccttggccctttgtaattttccactattccttggcgaacttttcaggttcattattatcttatgacttgctgcttttatgtatgttagttagctattgccatgataataattatgtctaaaaaccacccctgaactcaatgccatacaacagcaagtccttactctcctgttcacaggcttgcgcattgactgtgttcagctgatctaggtggggcttggctgagtggataggctgcgtgacgagttaagatctgcgccgcatgtgttctttcagggtctcaggccaaaaggacatttgttgccagggcatgctctgctcctgatgggtcaccagagcgcaagagagattgcctcaaccagagcaagtcacatggctaagcctaaaatcaattatgcccacagttggagagcaaagttacctcgcaaagagtatgaataataatctattagagggtgtgaggaattggactaaaattccagtctaccaccttaagaaacatacctctttatcctggtgaatgccttttagtccgggttctcttttgtctgataatattgcttttcaagttttattgtatttcttaagaatttcattttctaacccccttgtgtctttatgtttcagatctgtgtcttgtaaagagcatattgctgggcttacatccgtttatcttgtttgactgttattttaataggtgagtatagttcagtggcatttatcatgattgctcataaaaaatgttttattttctattacgccttaaacatttttgattgacatataatagttgcacatatatctttttttattgtgcaaattcaccttatccctttttctcccctaggttggtttctgctattatccttttttaatatgcatgcttaacaaaactcaaccttaagactttaaaatacttgaactccaaaatatccaccaatttctgtgttattcttgtctcatatattattttcttctagtttttgttgttgttgttgttttgttttgtttttttgagacggagtctcgctctgtcacccaggctggagtgcagtggcacggtctcggctcactgcaaactccgcctcccgagttcaagcgattctcctgcctcagcctcccgagtagctgggactacagacgcgccaccacgcccggctgattttttgtatttttagcagagacagggtttcaccatgttagccaccatggtagatctcctgacctcgtgatttgccgacctcagcctcccaaagtgctgggattacaggcgtaagccaccatgcccagcctattctcttctagttttaaatccccaaattagtagtagtagctcatttattctatatacagttcgtatccaggaggggttggtttcaagaccccccatggataccagaatccacagatgctcaagtccctacatccttctttatacattaaatcatctctagattatttgtaatacctaatataatgtaaatgctgtgtaaatcattgttacacgttattgtttagggaataatgagaaaaaaatctgtactgtacgtgttcagtacagacacaactgtagtaggcctaactgtattttttatctgaggctgattgaatctgaggatgcagaacctgtggataaggaggaccaactatgtatacacacatgtatatttaattgtggtaaaatacacaacatagaatttaccatctaaaccatatataagtgtacagttcagtggcatgaagtacattcacattgttatggtaccgtcaccaccatccagccagagaactcttcttcttgcaaaacagaaacccagtacctatcaaacaataactctgtacccccctttcccccggcctatggcatctaccattctactttctgtctctgaatttgactattctaaatacttcatataagcagaatcatatgttgtttgtgcttttgtgaccctgatttaacttagcataacgtcctcaagattcatccatgttagcatgtattggaatttcctccttttttaaggccgaatgataagtatgtcatatatggataaatattttgtttatcaatttattcatcattggacacttgggctgcttctaccttttggcaattgcaagtgacactgctacaaacatgggtatacaactatctgagtccctgctttcagttttttatatatacatgtggtaatgtctgtttttaatctttgattgtcatagtgttttcgataatgactgaaccattttatcagcatatttttgagcacctactatgaatatcaaaaacagacaaaaataagtccttgttttcatggagtttatgttgaggggggtgggtggacagtatatataactaaattatagtcatgtgccatatatgtatggactatatacatacatgacagtggtcctgtaagacagtggtccccagcctttttggcaccagggagtggttttgtggaagacaatttttccagggactgggggatgggagggttatggtttcaggatgaaactgttgtccctcaaatcatgaggcattagattcctataaggagcaagcaacctatatccctcgcatgcacagttcagaagagggttcacactcctgtaaggctgtaatgccaccactaatctgatagaaggtggagctcaggcggtaatgctcactcacctgctgctcacttcctgctgtgtggcctggttcctaaccaggaaccagtactgtaccagtaccggtacgtggcccaggggttgaggacccctgctgtaagattataatggagctgaaaaattcctgtcacctagtgactttctagccaatataacactgtagcacaataccattactcatgtgtttgcagtgatgctgctgtaaacaaacctactctgctgccagtcatataaaagtataacataaaattatgtacagtacataatacttggtaatgataataaatatgttactggttcatgtgcctactatactatactttttatcattactttggagcatatgcctatttatttaaaaaaagttaactgtaaaacagcctcaggtccttcaggaggtattccagaagaaggcattgttatcatagaatgtgatagctctgtgtgtgttattgtccctgaagatcttccagtggggccagatgtggaggtgaaagccagcaccaatgatcctggacactgtgtaggcctaggctaatgggtgtttgtgtcttaatttttaacaagaaagtttaaaaagttaaaaaatttttaagaagatagcttatagaataaggatataaagaaaaaatatttttgtacagctgtacaatgcattttaagctatgtgctactacaagagtcaaaaagttttaaaaaattgaaaagctggctggacacagtggctcacccctataatcccagcactttgggaggccgaggcgggtggattacaggaggtcaagagttagagaccaggctgaccaacatggtgaaaccccgtctctactaaaaatacaaaaattagccgggtgtggtggcagacacctgtaatcccagctacttgggaggctgaggcaggagaatcacttgaacccaggaggcttaggttgcagttagccaagatggtgccattactccagcctgggtgacagagtgagactccatctaaaaaaaaaaaaaaatgaaaagcttataaagtaacaaagttatagtaagctaaggctaattcaacaatttgaagaaataaaaattttataaatttagtgtagcctaagtgtacagtgtttataaagtctacagtagtgtacagtagtgtcctaggcctttgcgttcactcgccactcactcagagcaacttccagttctgcaagtttcattcatggtaagtgccctttaccagtgtaccattttttatcttttatattatatttttaccatttctctcctgtgtttaggtatgtttagatatacaaacacctacctttgtattgcagttgtctacagtattcagtacagtaacatgccatacaggttcgtagcctaggagcaataggctataccatatagcataggtgggtagtaggctataccatccacatttgtgtaagtacacttatatttgcacaatgatgaaattgcctaatgacacatttctcagagcatatctctgttgcaaagtgatgcgtgactgtatatattaatagtttgttagaaagtgatcactgtcggccaagcatggtggcttatgcctgtaatcccagcactttgagaggctgaggccagcagatcacctgaggtcaggagttcaagaacagcctgaccaacatggagaaatcccatctctactaaaaatacaaaattagccgggcgtggtggcgcatgcctgtaatcccagctactcaggaggctaagccaggagaatcacttaaacccaggaggcggaggttgcagtgaactgagattgtgccattgcactccagcctgggcaacaagagcgaaactccatccaaaaaaaaaaaagaaagaaagtgatcactgtcatgaaaaaaagtgagtgtgtgaggggtattaggaggatatctcaagcatagcacttctcaaaacttattataactgaatgttttctgttttatttgttctatcatacagggcaaaaattagtctattttgttacatatattttttttttaccctttacctaataaagactcatagcagctgctaaattaatatattttaatagtcatttcgtatattcatccaatattattgtgacatgagtataattgtcatttcagatgaagaatcttggaattctaaattgcaattctcccttaattcagttgccaagataatacagaaatggaatggaatagctggtctttgaatgaaactctcttttatgccaaatttggggttgctgcaaatctgggtgttttttgactcaggtttacatctgtcacctcatcgagcatacacctttagacacagaagatatctgaagaacagataggtaaacatcacttggtttatgcctctggtcagtgtgtccagagtgtatgaattacaaataaggaagattagtgtttgaggctatattatctattagtgtgtaacaaattacctcaaaaactagtggcttaaacaacaataaacattatctcacaatttctgtgggaagtgtcttcactgcgtatttgggcttgggtatctcatgaagttgcagtcaagttgtcagccgggctgcagtcatcagaaggctgggctggggctggagggttcacttccaagatagctggcttccaagttagtgttagctgtcaacaggaggcctctccctagggctggttgagtgttgtcatggtatggcagctggcttccctcaacatccatgatccaaatgtgcaagacagaagccctaatgtcttttataacctaaccttagaagtcacacaccatcatttctgcaatatcctattggttatgcaggtcaaaggtactcatggtgggagggatctacaaaggcatgaataccagaagacggtggtcactgggggccatcttggaagctggttatcacagggagccagtgagaaggcaccaggtaaattagatttatatcctaatccacaggtcctggttccacaaggataaaacacatctgcagtgcaaatagaagtctgaggaacaggtgtcttatcatggaaggagacctgacctgagacctgccttagaggctggagagtcctgaaagagagtggaccctggagttgctggagcttgtcttgacccttctgcccagagcaggcagggtctgaatgacatctcaatcttcagtgatcagcaatagctgtgtgacaatggagcgtttgagccacatgatggaaaggaaaggtgaggtggctcataggtggacagagcttaggagagaaaggctctacatttggggacagtgaaaagaaattcattactcctactgagaaaggtcacgtatgttaattgactaggcaggggagacatttgtttttaatcatattcatttgactatttgattttttaaaataaattttgaaatgcaatttttatttcttaagagtatgtttaagtatatctttaaatgctgtactataacataaacaaaagcttcctattccatccatcctggttccctgtccccattcctgaaaggcaaccactttgaacatttttgtctcaatattctggtattcacctccttttttctaaataacattcttacactgctaatgcttcatttctcagttttagatatttcctgttgatttttgataatgaagttaaggatttagctctctttcactacctaaccccttccgtttcatctccaccccaacacactcttctccttgcccttctttctaatatggtattattttttggaggttgaaggttgaccagatgtcagcatctgtaagcattttcttttgggctagtcagtttccccagcaagaagtcctagattttgcttgagaagtacaagccagaactcctgctttttgggagacgaaggaagtgagcatgttggacacctcatcttgcaatatgagaactttaattcttttctctctgcattgcttcaaccccacctttatctgcatctggtatgcctgaaattcagagcttgtctcattcagtttatctagagaaataatctttaatttttttctgttgccaatgtgagggaaatgtgactatgccatgttgggtgaaagaaaacatcaggtggttttaacatctttttatgacatcttacattcggttttatgtttttcagccctactcccaaactctagtccacagaagtaattagtagctccattcctgaacctttctagggtcttgtcatggcttccccaccctcctcccaccttcacttaagcttcagctttctctggttaagttagataccactcatttgtctgctctttagcttcccacattttgttgacagctcttatctgtggaaatcttctatattctttgtccttatgagttttagcctccttttttcctttattaacattatgattggtttgggagagagtggaaatattaataaatgcaggtattcaggcttttatttttaaccaaaaggccctgaattttttagggtaaaaaataaatcaagttttttaaaaatgtcattagaaacatgactgtattgcatcctatcttatcaatgttccacattacctatagccagtctctgatgaaggtttttttctaaattattttttttgagggggagacagagtctcgctctgtcgcccaggctggagtgcagtggtgtgatctcggctcactgcaacctgcactttccgggttcaagcgattctcctgcctcagcctcccaagtagctgggactacaggcgcacgccactacgcccagcgaatttttgtatttttagtagagacagggtttcgccatattggccaagctggtctcgaactcctgacctcgtgatccgcccgccttggcctcccaaagtgctgggattacaggcgtgacgaccgcgcctggccctaaattttttatggttaaaaaataacattttaggccaggcgcggcgtcacgcctgtaatcccagcactttgggaggccgaggcaaatggatcccttgaggtcaggagttcgaaaccagcctggccaacatggtgaaaccccttctctactaaaaatacaaaaaagttagccaggcatggtggtggatgcctataatcccagctacgtgggaggctgaggcaggagaatcgcttgaacctgggaggcagaggttgcagtaagcagagatcaggccactgcactccagcctggacggcagagtgagactccatctcaaaaaaaaaaagaaaaaaaaattttaaagatcatcccaatctttaaatttttggggtaactattattatgtacttaagataaacttcctgttagaaataaaacagcaagattctagggagataaaatattgccaatagattcattgggcactgcatacttagccctccataaatccccatcagaccccatatgattaaattagccatctgtgtccatttcagtgtctatagctagatggcagttaacatttcttattgcttcaaggatcattcatctgtagagggtcttctagccacctggtactgaagatttctatattcctttgtctgaaactttgaagcaaatctgtttcatttctcttccctcagcttggtgttctcaagagtctgccctttccgaggaagaagaggatacaaccaggcctcttgtacgtcttaagcatttatttgtttcctgcattattttgcagtgcagttacggtgggttcttgtaacctaccaatgtgttggaaaaaataaattgatgaaaataaaagtgagaaaaaatacagatagaaaatcagaacctggggaaatttgagatatggctatgcagaagcaggtacatacagaattattaaagttgagttcaaatttaaatatgatctggacagtcaaagcaaactgggacacttaagtttattccgtaagtccataagttgcaccatttatgaggaaaaacttacaattatttaagtaaaaggcttttaactggcaccttgttcaaaaagaaactctaaaatatagttggacttctgtatctgtagattctgcatccatagattgaaccaactgcaaatcaaaaatacttgaaaaaaaaatgggtggttgtatctgtactgaacatgtacagacttttttcttgtcgttttctaaacaacatagtgtaacaactatttacatagaaatcacattatattaggttttataagtaatctagggacgatttaaagtatacgggaggacgtacattggttacgtacaaatcctacaccattttatataagggacttgagcatcagtggattttggtatccgtggggggtcctggaaccaattctacatggtttcctagggacgactgtaattccttaattcttacaatttttagcttagcttttagaagttggtcttggccaaacttcaaaaattcaaattacctggaagagtaagtggaacacatatctttcaaatgatcctacgtatatattttcttcaattgagtttttaatccaagttgagctaaattatactaatattctatggcagaatcttatagttctgatatccatagcttttcacatcttttttatggtctcagaagatatagtcttcatcctcatcttacaaaattacgtattctctgctcttgattctttttgtttccacctctgaagtcactcacacacctatattttgaatgttttctgcttaactgcctctttttcttcagcttatgtctttcacatcatgaaatatacacacatacttcttttgaccatatgatcatatggctcatccagttacttctgttggcgcggtggccctagcaaacctctctggccctcgacaggcttgagtttaaatcttggctcagtgacttatgaagtgcatgactgtggacaagtttcttaatctttttgtgactcagttacatcatctgtaagtctataaatggggatgataatggtatttatcccacaggaatgttgggagggttaaatacatgtaacaagtaccccataaatgataggcattgttatttttttctcaaatatttttggtctgccattggttgaatccatggatattgaacccacagatatggagaaccaactgttacagctttattgagttcttactatgtgccagatgtattgtgctttacatagcttatttcatgtaattattatcagacgtctatgaagtacatattatttaaattttttaagataagggaaatgaagcacagaggttaagcttacataacatcgtgcatcaatgtgtcataaacccaggattcaaatccatacagtctgactctagggcccacactctacgatactgtacagatggaggctcattatgagtgaagaaatacaaaagccaattacccattcatattgtttgtctattttgtaataatagttttttctgtattcgaaattagaatattttaagaatgtctatttcagtattaggacttaggatttatgcagctaccttctcccaatctgtcatttttatgttatttattttttgttgtatagacattgaagtttggatagttacatttagtgtatgataaatatgtatacataatagaattcagtcaaaatatgcaactattaatatttagtagtcttttctcatgagttgccaatgttaatcttttctaagatatctttcctaattaatattagatcatagagataatctctgttcaaagcattgttttccatatttagtctttaatccaactggattataatattgtaattggtttgagataggaatttactgataattctattagtagaattatctttgcatgtagaagaccagttgttccaacaccgtttattaagtagatctttcctttgtgatgccacctttactgtatacatacatgatggtttctaggcttttactttttctgtaatctatttgtctacatttatatcagtactgtactttgtgtgtgtgtgttttacattggtttaattacaattactttatatgggcaatgatttcaccacttctttatgcacacacattattcttagtttttcaaaaatttttcagctactttgggacctctgggcttccatttgaattttagaattagtttatctagttctaggaagaaatcctattggggatttccattgaattgcacaactagttggagaagaattaagcaaaaaatacatatatataaaaaatatataaatatatatatatataaagatatatgtgtgtgtgtgtgtgtatatatatatatatatatatatatattatatatatatatatattttttttttttttttttttttttttttggtgatgaagtcttgctttgttgcccaggcttgagtgcagtgacacgatcttggctcactgcaacctccacctcccgggtttaagtgattctcatgcctcagcctcccaagcagctgggattacaggggtacaccaccatgcctggctaagtttttgcatttttagtagagatagggtttcgccatgttggccaggctgacctcaagtgattctgacctcaagtgatccacctgcctcagcctcccaaagtactaggattgcaggcatgagccattgcacctgtcccgaaagatattttctgtcacaattaaagatgtttccatttaagggaatctattaatataaattattatattcaagagaaaaacaatcagatctatagagctgaaaatttttttaactcagaacctgtgatttcaaaaggacctatttataaagtaaaagtaaaagaacattttcttatgatattttaagaaattattcacacgcatacaacacatatatatgtgcagataataagctacaagctagtaccatgtttacttgtaaaaattaggcactttcctactagtcaggaacacaaccagcttgccagtgctactactacgattttgtatgcctagacataagtaaggggagggaaatgaagtaaaaagcaggatggtgcattcaaaattatgatatctaagtgatacaattatgtttttaggcaacagaagagaaacacaagaatgattgaaatatggacacaaaattaatatacaaaaatcaataccatttttctctataaaccacaccatcaaaaatgaaatggaagaatgatgctcagactagaaaaaaacccgaaagaaaaaaataaaatgtatgtggtgtacatgggagaatgaaaccttcaaattattactgagatagaggatttgaacaaattttttaaatacccttttttggataagagccatcattattaaattaatataaattgtctttaacctacatagattgatcagaatctcaataacaattctaaattatttttcttagaattagacaagtttatttgagccgagtctagaatacatttgaaaaataaaaacatgcagaatggccaggaaaagtataaaagaatgtcatgtgccatgctctaagtttttaaaagaagaatatttgtttaatgcttacataactttagggaaaaaaaaattttataaaaagttgccagtcaacatatacacccagaactgacttgtagttatctttattccctcactgtaaactttgttattttaaacaattatattctattatgtatcttaaaagtgaagaaagcgaggcatggtggctcacacctgtaatcccagcattttaggaggccacagctggaggatcacttgaggccaggagtttgagaccagctggatcaatacagcaagacccagtctttacaaaaaattttaaaaaattagctgggtgtggccaggcgtggtggctcacgcctgtaatcccagcactttgggaggctgaggcgggtgaatcatgaggtcagaagatcgagagcattctggctgacatggtgaaaccccgtttctactaaaaatacaaaaaattagccgggtgtggtcgtacacacctgtagtcccagctacttgggaggctgaggcaggagaatcacttgtacccaggaggcagaggttgcagtgagccgagatcgcaccattgcactccagcctgggcgacagagcaagactccgtctcaaaaaaaaaaaaaaaaaaattagctaggtttggtggctcacatgtgtagtcccagctactcaggaggctgaggcaggaggattgcttgagctcagcagtgagtcttcagtgagctatgattgtggcactgctccagcttaggtgacagagcgagacccagtttcaaagaaaaaaaaaagtgaaggagaggaaggtgctgtggtaccagcaagaacattggaaatattattgcctcttgccaggggcagaagcgtgttcatgtttttttttttttttggttctgtttgacaggagaaggaataaaacttaatgacatgaactgtgaatttatgttttttaaggttcgaacccctatgtttcttgctattaatactgaatttcttaacatttgtatgtgaagagaatcaacatcttgggaaaatagaccctattgtaaagactgactcatcattttatacagtcaaaaattaaagcatattttacttcttggtattttgttacttatggcttttgtcagggatgcaatttcttttttttttttttgagacagagtctcgctctgtcgcccaggctggagtgcaatggcacaatcttggctgactgcaagctccgcctcccaggttcacgccattctcctgcctcagcctcccgagtcgctgggactacagacgctcgccaccacacccggctaattttttgtatctttagtagagatggggtttcaccatgttagccaggatggtctcgatctcctgacctcgtgatccgcccgcctcggcctcccaaagtgctgggattacaagcatgagccaccgcgcctggccaggggtgcaatctttttatatgagatttatgctaagttactagagttggtgggaaaatgtttttgtgctgatttgttagcactaatttaaaaaatgttttctctttttgtagttttcccctatctttgttgtggtgtatattccagagggattatctatttctgaaacattcatcagttgattattgtgtcaagctctgttctgagtcacatttactgtgttatttagtcttcacatcaaccctttaaggagaattccactttatagatgaggaaactgagactcaagtttggctatttgtcaaggtaacacaattagtaaattttgaagccagagtttgaacccatgacattggataccacagcctattaactggtaaaaaatatctaaacccagctccgttttgaaagtttagtatttcagcattttttttcagtcagaaatgtgtcagtcacatgtctgttcagcctttctgctgcttttgtgaatagaaaacaggcgttcattcttatccttggggtctgcaggttaactatgtgggcatctctgctttgggctgcagatcagctggccttggcttaggctccacagtgggcttgtgtctgctctgcatatattcattctgagtttcagctgaaatggcacagcttcctgggccaaggtcttcatttgctgtctcactggagcacatgagccaaggtaaagggtgtaagcaaatttcaggcctttgctcacatcatgtttactgacattccttttgccccaacaaagggctcagacaaggcccacattagtagatgggacattagtacaggcaggaagtgaagactcgctgaataatcaatttatcacagtaatattttctaatggaattattttttgttgagtttgtttttgagaccaggacttgctgtgttgcccaggctggagtacagtggcatgaacttggctcaggtgatcctcccgcctcagcctcccgagtagctagatgataggcatgtgccatcatgcctggctaatttttttattttttatttttcgtagagatggagtctcactatgttaccaaggctgttctcgaactcctggcctcaagcagtcctcctgcctcagcctcccaaagtgctacgattataggtgtgagctactattcccagcttcactgagattttttaaactttaaacatattgaaatatagtcttataacttaaaaaaactttattaacatataagtcacatactataaaattagcccatttaaagtatacaagtgagtggtttttagtgtattcacagagttgtgcaaccatcaccataatcaatgttagaacattttcatcaccctgaaaagaaaccctttacctgttagctttcacttcctgttttcccttaaggctctgatgtaggcaagaataaatgatttctagctctatggatttgcctattttggacatttaatgtaaattgagtcatatgataaactgttatcctttgtgttgcctttcgcttagcattatgttttcaagtttcatgcattttgtagcttgtacgagtactttttatttctgaataatattctcttgtagggatataccacattttctttattcattgattaatggaaatttgattcatttccccttttaggctattatgaataatgctgataagaacattgatgtacaagtttttatgtggtcatatgttttcacttctctgaagtttgtacatagaaatgaaattgctagatcatatggcaactctatgcttaaccttttaaagaattgccccactgttagccgagtgcaatggctcatgcctgtaatcccacactttgggaggctgagatgggcagatcacctgaagtcaggagttcaagacccacctgaccaacatggtgaaaccctgtctgtactaaaaataaaaaacaagtagccgtgcctggtggcacatgcctgtaatcctagctacttgggaagctgaggcaggagaatcacttgaacctggtaggcagaggttgcagtgacccaagaccacacaccattgcactccagcctgggcaacaagagcgaaactccgtccccagaaaaaaaaaacagaattgccctactgttttccatagcagttgtgctagtttacattcccaccagctgtgtatgaggattccagtttctccatcagcacttgttcttatctgtcctttggttatagctgtcctagtgggtgtgaagtaaagctcatgagattttgatttacacgtactgtataacttgtgatgttgaacaccatttcctatgtttgttggccatttttattaatatatcttctttgaagaattgtctattcagagcctttgcccacttctaattggtttgtcttttgattattgaacttttaagaggtctgtacatattcaagtgtcatcagataaatgatttggaaatattttatcctatcctctgggttgtcttttcactttcttgatgatgtccttagaagcacaaaaatttttagttgttctgatgtccatttttatttaattttcttttgttgcttgtgcttttggtgtcatatctaataaaccattgcctaattcaattgaaggtcataatttacaactatgtattctgagaccttttttttttttttttaagctcttacagctagatctttgatccattttgagttaacctttgtatacggcatgatccaccttcattcccttgcatgcagacagtccagttgttgtcccagcatcatttgttgaaaagactattctcttccctggtgaagttttttatcaccatttattatgatgtgggggttttgtagttgccctatatcatgttgaggaagttcccttcttttgcttatttgctaatttgttggatgttgggttttttggttgttgttgtttgtttgttttcaatgataaaagggtgttggattttgttgactactttttctgcatttacggagatgatcttatggtttttgacctttattatattggtatgatgtattacattaattatcagatgttaaattaatattgcattctgctggggtaaatcctacttggttatggtccataatactttttatatgttgttggattaggtttgttagcattgaggatttttacctctctattaataagagagagtgggctctagtgtttttttggggggtggtgcgtgtgtgtgtgtgtatgttctttgtcaggttttagtattagggtaatacttgcctcataaaagatgtgtcccctccttttattcatcctctttgttttggaagagtttgtaaataagttagtattaatttttttgttgtttgttaaaattcaccagtgaagccatctaggcctgagtttttcttttgggtaggtttttttttttgttttgtttttttgttttttttttttttttttagtaattcagtctcttgttacaagtcttttcatcttttctttttgttgcagtttaatcagtttgtgtctttctagaaattcattcatttcatctactctagtttgttggcatatatttattcataatatttctttgtattcctgtttatttctgtaagattagtagtaatgtttcttctttcattcctgatttttgtattttgagtcttcttgtcagtgatatttgtccattttgtcaatttttagttttattgattctctctaatgtttttctagtctaaatttctttgatttccattctgatgtttgcttatttccttttagttactttggatttagtttgatcatcttcttctagtatcttttttttttttttttttaattgaggcagagtctcactctgtcacccaggctgaagtgcagtggcatgatcatggctcagtgcagccttgatctcccaggctcaggtgatcctgccacttcagcccggtcccctaagctcccagtagccgagactactggcatacaccaccacgccctactaagtttttgtattttttgtagagatggggttttaccatgttgctcaggctggtcttgaactcctgggctcaagcaatccgcctgcctcggccttccagagtgccagattatgggcacgcccagccctcttctagtattttaaggtagaaagttagtttattgatttgaaatctttcttcttttttaataaagtgtgtacagctataggtttccctctaaaacttgctttaatggcattccataagttttggtatgttgcaccctcattttcttttacctcaaagtattttgtaatttccattgtgattttgttgatccattggttatttcagaatattgtttaatttttacatatttttgaatttcacaaatttctttctgttagtgatttctaatttttgcccattgtgatcaaggaacatactttacacaattctcttaaaatttattgaggctttttttttttttaagagacaggtctggctgtgtttccctggctgaaattcagtagctgttcacaaacataattatagttcactatagccttaacctcctgggctcaagtgatcctcttgcctcagcctcctgtgtagctgggcctattgaggcttcttttatagactaacatattttctatcttggagagtgctctatacacttgagaagaatgtatattctgttgagtggtgtgttctataggtgtctgttagatctggttggtatatggtgtttgagtcttctattttcttgcttataatctgcctagttgtatccattattaaaagtggtgtttgggctgggttcgggggctcacgtctgtaatcccagcactttgggaggctgaggcgggtggatcacgaggtcaggagttaaagaccagcctggccaagatggtgaaaccccatctctactaaaaatacaaaaattagccgggtgcggtggcaggcgcctgtaatcccagctactcaggaggctgaggcaggagaattgcttgaacttgggcggcagaggttgcagtgagccgagatcgtgccactgtactccagcctaggcgacagactgagactctgtatcaaaaaaaaaaaaaaaaaagtagtgtttggagtctccaaaaattattgttaaattgccagtttctgccttcaattctgtatttttgctttaggtattttaagactgttagatgcatatataattgttatatctttctgccagattgacccttttatcattataaaatgtcctttagtaacagttttgttttaaattctattttgtctgatattagtatatccactctagctttctatggttgttcgcatgctgtgttttttccatcactttattttcaagctatttgtatatttgaacctaaaatgtatttcctgtagacagcatgtagttgaattctgtttttctatccaatctgacaatctgtccttttttttggcctgtttaatccattcagagttaatggtaacactaaaattattgggctatgtctgccattttcctttttgttttccatatgtctcatgtcattttttgtttctcctttactgctttcttttcactaagcaaatattttccagtataaaattataatttctttaatgatttttcactatattttcttagtggttgctctaggacttggatactatgtatcttatcagaacctacttcagatttatactaagttccattaagatatggaaatgttggtcttatgtagctctattccctcttcccttgttttgtactattattgttatatatgttacagactcaacccattattataattactactgcatataatgttgcatcacttaaagaagctgagaaaagagagcaaatatgtattatgtttattatattaaccttatttaccatttgtttgtgttgattcaagttctagtaaatcttgtgtcattgcttactctattccaaatttgctctgaagattctctctttatctctggttttcaacatttttgctatggtatatctgactgtgggcctcttacatttattttacctggagttcattgagcttcttgaatgtataatgttttttgtcagatttgggaaatgtccaaccattatttctttgaatgttttttctgcacctttctctcttcttcttctagtactcctacctctgacccctgagtaccagctaaacaagttcttgtatgttgtgatcacaatgcctaattttgatgacttcaaattaattagcattatgtttttacaggaaacagtgacatttaaggatgtggctgttgaccttacccaggaggagtgggagcaaatgaaacctgctcaaagaaacttgtatcgagatgtgatgctggagaactacagcaacctagtcacagtgggtaaggtggcttggtagccttgcaatttaacagagaattcttttccatttctgaaatgtgtgaagactgtaacttgccagatgaatctagcctttcctttctccatgtgactatatgtgctccactcttcagtgttaaaggctgattactttgtgtcattgtgtaagttcattcatcctcatcttttataagccctcaagcttggacttagcctaagatctgaatggttgtctccagcattgacatccacatcctttgctatttcttgtaataggctgtcaagtcaccaaaccggatgtgatattcaagttggagcaagaagaggagccctgggtgatggaggaagaaatgtttgggaggcactgtccaggtgaataagtgaaaagcagctctgaatgagaaagccacatgagagttgttcagtgaagggttgatatcatttcacaatttccaagattttcttaaaggccttattcttctagagtgacaaatgggatggagtgctttagattactgtgacatttctaggtattattcttcctattttgcagatattttcctcttttaaattgtagagggccagtagccctatccaatttcataataccaaccttccctaattcattcacagcttcactttcaggattattgttcctctctctatgatcctcgggcactctctttcctttatgtttatggtttcattttcttatgcattcagtatttcatggttgtgtagtaattttaaaacatgtttcacacttaggtttcttttcatttctttccttctttcttttttaaaaagccttagatttgtgtttggttaacaatagtttcacttcccattgtgcttcacaaccctcacaatcccatggcttagaaatgtaaaagtttctggcttagaaatcccatggcatctcctttctgcttattcctgccttccattcctttaatttttttgaaactacatgaggtccatccttggttgaaaagatataaccaatgtaaccaatattatacctataataccaatattataccttttgtgcaaaagtaaatcttcctcttatcctggacatggtcccttcctttccacagttgcatacacttcttttttggagttatcctggctatttttgattatttattttaccatatgaattttagactaaactgtctatttccagagaaaaacctgttggaatttttattgggattgtgctaaatatataaattaactttcagaaatttaacatccttttaatgccaatgttttctgtctaagaacacacactgtctttgttcagattttcatatctacttctgtgtcctttagaaatggagctttccaagttttcccattgttgcttttatacatttcactataataatgggtaagaaagctataaaaccatccttatttacagataatgagattgtatccctagaaaacacaagcaaaccaattgagaaagtacaacaaatagtaacagaactcagtgaggtggtaggatatcaaattaacaaagaaaaatcaatagctttcatatatacttcaacaaccaagtagaagatactaaggaaagaaaactacatttatagtagtaagaacaaagatgaaatactcttctgggcatggatatataacagtataccaaacaaaatcctgtctttatgagcttataatttaatggaaactagagtccctgaggttttgcatatgggaaaatatctttttaacctttacatttggttgatagttggctgtgtgtaaaattcttgaaccatactttcttttccaaagagttttacagacagttacctgagggatttagacaattctctgttgtttcctagattcaaatgttgcttggagaagtctgaagcctgattatttcccctcataggtgacttattttccaggatgcctataggtttctttttctttaaagcttaagtggctttatgaggctatgccttggaattgatcaatcagtatcagtttttcctttcagcttgtggattcatgatttttgttccttgaaatgtcgtcatatagatttcatgctcgtttcttttgtggttatcattgtcatctttcgatgaaggtatttcctgctgtagccactgtttacagaaggatagtgttgaagactgtccagaaaaatactctgagttggtaagaagtctctatacctcacactgacctcctttatcatacaaggttttgtgttgagagttggtttaccctttcattctcccaagttaaagagagattattatttgcatacttcctctagaactcagtgtctcttccatcttcctatgctaacaaactgcttatataagaatactggctgtttgcatctctttgttcagccctgcctttgtaccatttgtcagggccagatgaagtccattctgtacctgccacaatttcaagacatctggcaaaaaaatgactcattcattctgcccacaagggggtgcctctgttttagagaactctgttccctgtactttttgttggagataagaaacaggaactgctatctctgggtttcttccctgcctaatccagtctattttctgttctttcctcctattctggggatggagtttagctatctttaaggttcattgaagatgtattttctttctttttttttttttttttttttttttgagacggagtctcactctgtcatccaggctggagtgcagtggtgcagtctcagctcactgcaacctccgcctcctgggtttaagcgattcttctgcctcagcctcccaagtagctgggactacaggcacgcgtgaccatgcctggctaatttttgtatcttttagtagagacggggtttcaccatgttggccaggctggtctcgaattcctgacctcgtgatccgcccacctcggcctcccaaagtgctgggattacaggcaagagccactgcatctggccagaagatatattttctttttctgtttcttcttcatgtttgcagagtgaagaggagacagagatgtttaattctaccatattgaaacaggaagtcctctatgctgtatttgatccatttcacccttcttggaaatgtctttcttctttgtgcttctctaaaggattcaaattcttccttggttctggtttattgtttatttcttcttcccttgtgaaatatcttttacatgacttctttctcatctctcactggacatcacccaaagtagttctgaattacaatagacttctttttcctcagagtaccttcatgctatatctgtgttcatgctattaaataggtatttaactctagaaatgacagcattggaatatgtatctttaatgcctccagaattttgaaactcttcatatctctgccattaattatgagtgctcttacctaagttctagcagttatttaactttaatatcattttctaataaatggtcctcaatatttccagcctacattggtcttgcccatctctcaactaacattctattacacgtctaccagagtggttggaatctgaaaacatatactatcttctacatgttttcatattttgatgtctaacacttgtttattagtccacctggagaaagaaaacttttattcttcctataaatgagtcatgattgatgtagagctatatttgggaagatttttcttatttttggttgttttaaaatatttacctacagatttcaaaataaacgtggaagaaatcaggctagagttagaaagacagggcatagtcacatgagatagtgttgaatgttaaattgcatgtgaagtgtctatttagtaaatgagtaaaccagacaacacctagaaagttttaagagaagggctgtagaaggagtaacaagattgaggctttctttttctttttgataagagcttggcattgaagccattttcctgtaagatctatagcttatttagacttattaaaaattagaaaacataacaaaatgtttggaaagtaaaattagcgtgtctgtttggggggtaaaattagaaacatggcctgattagaggagagaagattgtaagagattagtgaaatcaaggatgagttttccattgtagagtcagaaagttctgaattttgctagcattcatgttctcttttgctgtcttttatttttaaaattttgttgtcaatttagtttattttttcccctctttaatcactgaagctatagttttgccctgtgcatggtggcagcaaggttacaatggtcaattataagcaggggtttataagataaacagaatatgaaggttaaaacacatctagttatctgaattttaagttacccacagctgatggaactccaggggcgtggaaaaccattgtagaactaatgatgtaggaatgttatcattttgggtgatggtatgaaagaaaaaagtcaaaacacaatggaatttgatataaaggcagtttcagtgtggagaaataaacataggataagatgataggacctgctgttaacacactgtggtgaatcaaagatggcttgcctcctgatcagctttatactttttattcaataaaattagaccttcctatttctaatatgccttgttctttaagcacatataaaaatgaatcacaattagatggaaagttggagctctctccatatttattaccaattttggatcgtatttagtttggacagactaatcttcaagtatgtttagatagaaataaaggaatttgaactttatgaaaattaatttgcctgtggtatgcagactgcacaaaagatagacttgtcaggatcatgacagttaatctaggcaaaagtaatgagaacttgggttatcatttgtttctcttaacctaatgtagctgttattatttctcatgccatttctttcccttttaatatgcatttttagttttttcaaagtataccttatacattacttgttttagagagccagtagaaatgtcagattatagcagtgctgtgctctgacctcacatttcacctcctttagtcaattatttttgactttttttaactatctcttttgttgtcgacctacgtattttgaaacaaatgtttatactgctctgtaaatttttttttttttttttgagacagagtcttgctgttgttgcccaggctggagtgcaatggcgtgatctttgctcactgcagctctgcctcctgggttcaagtgattctcctgcctcagcctgccaagtaactgggatcacaggcatacaccaccacgcccggctaattttttgtatttagtagagatggggtttcaccatgttagtcaggctagtctcgaactcctgactcacctcggtctcccaaagtgctgggattacaggcgtgcaccaccgcacccagtctgtaaatgtttctgtagtcattttcaaacataagaatagagagataaaggagctggtcgcggcagctcacgcctgtaatcctagcactttgggaggccaaggtgggcagattatgaggtcaggagatcgagaccatcctggctaacatggtgaaaccccatctctattaaaagtacaaaaaactagccaggcgtggtggcgggtgcctgtagtcccagctactcgggaggctgagacaggagaatggcgtgaacccaggaggcagagcttgcagtgagccgagatcacgccactgcactccagcctgggtgacaggaccagactccgtctcaaaaaaaaaaaaaaaaaaagaagaatagagagataatataaggaatcctcatgtattcatcactcagcttcaacagttaccgacattttcttagatttgtttactctgtttctctcttacccccactccagttttgttttgtttttttgctgaactactttaccttttcttttaaatactaccatatgtattgccaagagatttgtttaatcctgcaatatttctaacacacctaacaacattagtaataatttcttactatcatcttctacttagtctctgttatatatttcattgtgtcaagaatgttgtttatggttggtttatttgaatcaggatccaaataaaatctgcacattcttagttcacagactatacaaaagcaggctgtgggtatagtttgccaacccctgctctagatgtaccttattctggatttgccatttgacctccttgtggtggtgtttgacatgcttctttatcccatttttcctataatctggctttattcaatgcagattcaaatctttggcaagtatacctcataggtgatgctgtgtacatcctattgcatcttatgtcagtttgtcccacttacagacataattgagattgatcagtagattcatgtattgtcaggccaaatcctcctatttcagtgatctctgtcaacctttcacttaagggttttagcacctattgaccatcatagcctagatccattattttattgagcgtctttcacttttattagctgaaattctcccaaagagaaaaactctctcattaactatttgattgcactgaaatacagtttctcaggccaggaaaaagaaatactctttctcttcaaaagcttttagaataatgattggtgtcctagaggtttccaaaatttgtcaagttaaatcattataaatttatgtaatttgagcatcagaatatattataggcatataaatatttttcatatattattattattataatattgaagacagagtcttgctctgtcgcccaggctggagagcagtggtgtgatcttagctcactgcaacatccgcctcccgggttcaagcgagtctcgtgcctccacctcccgagtactgggattaaaggtgtgcgccaccacacctgtaatttttgtatttttaagtagagattgggtttcgccatgttggccaggctggtctcgaactcttggcctcaagtgatcagcccgctttggcctcacaaagtgctgggattacagtcatgagccaccacaccaggcccatatattaatactcaaattgtctcatcttgagcaagagggatctttagttaatcttgtaagtttcccgctccagacatggaaatagccatttctttaaaaacttttgcctcttttagcaggaaatgatattgtggagactgcagtctgaggattatggttgctctttaatactgagttattggttctatagcttttaagtggacagagctaggaaaaatgcatcttttaaaaagaaaaaaataggccagtcacggtggctcatgactgtaatcccagcacttggggaggttgaagcaggcgaatcacctgaggttgggagtttgagaccagcctgaccaacatggagaaaccccgtctctactaaaaatacaaaattagttgggcgtggtggtgcatgcctgtaattccagctactcgggaggctgaggcaggagaattgcttgaacctgggaggtggaggttttggtgagccgagatcatgccattgcactccagcctggacaacaagagcaaaactccatctcaaaaaaaaaacaaaaaagaaaaagaaaaatatatatgaattttagatacatccaattaaaattaaaaagtatagtgcccttttaccttttatgctgaaaatcttggctcctcattacatgtttatttccttaattcatatatatttctcacccttgacactattgacattttgggccagataattctttgctctgggggactgccttgtgtgttgggggacgtttagcagcatgcctgcttctactcactggataacagtagcgccatccctctttctccccatcatcttcccagttgtggaaaccaaaaatgtctgtagaccttccagacattgcccagtgacccttaaggagtaacactgattaatctatcttctttctttatatattaatttcaaattaacagtaatgctaatattactaataataaaaagacaactaaacgtaatttaagatgtcttttgagttttcttccttagaatatattctaatagggatatatagtcaaactactatgtttaaggttacttgaagtaattttctatgtgattatgaccctcatttgataagtaggcttgtttccaatttttttctatttttagggattgctttggcttttttcttttttgatttaatttttattttttcatatgtaaaatatgtacatgattttattgtcagaactctaaagttacagtcagagaagtcatggtttcagtacatgtaagtgaaaaaaactcagcgtagagaacattgtttagaatatactctcttttatgtgcaaatggatgggaagagagacagagagagaagtgtgtgtgtgtgtgtgtgtgtgtgtgtgtgtgtgtgtgtgtataaaatatatattaaaaatacaattggccctcggacaacatgggtttaaactgcacgagtccacttacatgctgattttcttacacctctgccacccaagacagcaagaccgacctcctcctcagcctactcagtgtgaagataatgaggatgaagatgtttaggattatccacttccacttaatgaatagtaaatgtattttccttatgattattgtaataacattttattttctctaagttattttattgtaaaaatgcagcatataatacatatacaaaatatgtgttaatcaactatgttttcaataaggcttctggtcaacagtaggctattactggttaagttttgggagagtcaaaagttagaaacatttgcaattatgtggaggattagcacctcatccccatgttgttcaagggccaactgtacatatgatatatgcgtgtatatgtactatatataaggaaatgtgtgattatatgtgtgtgtgtgtgtgtgtgtgtgtatgtatgtgtgtgtgtttttttaaatagtggaagaataatccaagaactggctgggcgtggtgtctcatacctgtaatcccagcactttggaaggctggggcgggcggatcatgaggtcagaagataaagaccatcctggccaacatggtgaaaccctgtttcaactaaaaaaacgcaaaaaattagccgggcgtggtggtgtgcgcctgtagttccagctattggggaggctgaggcaggggaatcgcttgaacccgggaggcggaggttgcagtgagccgagattgcgccactgcactccagcctggcgacagagtgagactctgtctcaaaataataataatgataacaataataataatccaagaactaataaaaatggttatctatagggcaaagcaggaattggtgtttcagggacagggtggaatctggacttccgctgctgtttggtaatttgtcagtttttatcaacttgatataaatagaagatgaggtttagtagcattaccacaatcacttctcctttccttttcttctggaatatagatacatcacaatttttagctaattcaatttcaccacttactttgttatgattgttgacatattgtttactatgaggcaagaaatgactcttaattaatatacttatataactttttgtcactcctagaattactacttgccttatttttctattttctatgtattattaatttaaatgataccctcaaaattctttgtttaaataaggaatccatcgttgttattagtttacctcattttgatgcatgaagggataaaagggaaattctaaacatcttccaaaattctaaattttaaagaggataaaagaaattttttagtttttttttttgtttccttttttttttttttttttttgagatggagtttcgctcttgttgcccaggctggagtgcaaagttgcaatctcggctcaccacaacctccgcctcccaggttcacgcgattctcctgcctcagcctcccaagtagctgggattataggcatgctccaccacacccaactaattttgtatttttagtagagatggggtttctccatgttagtcaggctgaactcccaacctctggtgatccgcctaccttggcctcccaaagtgctgggattacaggcttgagccactgcaccctgcctgtgttttttttaactagtggactatactgtagaatggttggatcagaacctagaagattttttgtttgtttgtttgtttgtttgtttgagactgagtctcactctgttgcccaggctggagtgcagcggcacgatctcggctcactgcaacctctgcctcccaggttcaagcaattctcctgcctcagcctcctgtctagctgggattacaggcacgtaccaccacgcccagctaatttttgtatttttagtagagacggggtttcatcatgttggtcaggctggtcttgaactcccgacctcgtgatccacctgcctcggcctcccaaagtgcggggattacaggtgtaagccaccatgccctggctgaacctggaagttttgtgtggggccccaaatgccagcatctgttgttccttttaatctttttatctcctatgtgtaggtacatgccagcattcatgaggctaaataacagaaagggattgttgatctcattcatgttagagtgtatggtgaatctaaatcacatgggaactctacatgcagttatgtctaggaaatgtagttttaactgcctcagcctttacgggatggaaaagcatggtgggagactggaatacatgttacttaagcagatccataactcttgccttggtgtgtaactgctccctactcagactttaatcctcttctttttagtcccactcttatcctacccactccacttttttttgagatgaggtcttgctatgtttcccagactagtctcaaattcctgggctttagcaacccttccaagtagctgggaatataggtacagcccactgcatctggttttttaaattaataaacttcatcttttaggctggttttaggttcacaacaaaactgagtggtgtacagagctcatgaaaaagtaccaagtatatggatacccactgcccaggcacacacagccttccccactgtcaacatcttgcaccacagtggtatatttgttaccatcaatgaaccttcattactgttattattatacacattattattacacaaagtccataatttacattagggtcactcctggtgttgtacattctatgggttttggtaaatgtataatgactcagatccattatagtatcttacagaatactttcactgtcctaaaactcctctctcttcctcctgtttattccttcctctcccataagctctggcaaccactgatacctttactagtcatcattttgccttttccagtttggaatcatatagtaggtggccttttccaatgggtttcttttacttagcaacatgcatttaaggttcctccatgtcttttcataacttgatagcacatctgtttttatcattgatgaatatttcattgtctagatgtagcacagtttatccgttcacctagtaaagggcatcttccaagtgttggcaattaggaataaagctgctgtaaatatccatgtgcagatttttgtatggacatatgttttcaactcattggggtaaataccaagcatgattgctgaataatatggtaatagtatggctaattttgtaagaaactgccagactgtcttccaaagtggctgtaccattttgcagtcccaccagcaatgagtgagaggtcctattgctctgcaaacttgtcagcctttgacttagtagttgcagcaggggttttttgttgttgatttttttttttttttttttttttttcagatttcctacatagatgatcacatcacctgtgaacaaagacagttgttgtttcgtttttccttcctaatctgaatagcttttatttccttttcttgttattgcattaggtaggacttctagtacaatgttaaaaagcagtaatgcgagggaacatccttgccttgtgcttgtttatccctaccttttgagcgcctagattctccaattcttgagcctttccagtgatttctggccaaatctctttgttgcttattgtcatttgcatcttcatgatactttgtagctttgctattcagtttatcctaaatgcttctcatcctgcagtattatgttaaaatctcttgttcatctttttttacactcacgtctcctttttcttatggatttaaccctttattccttcactatcattttaatggcattttaggaaggaggaaaaatacatgcattcaagcctgtgtgtttagtcacaaatgttcattttgttctctagccgtttgactccctatcagtcatttttgtgttcaccctttcattttaattattctattcattttgctgatttctgcactatacgtggacgctttaaaaatcagtcaaggctacttggacctacagatgtcagtttttgtctccatatgttttatgtagtagttaacttctcaaaccttaggaactaggaacatttactcttagctttcttttgtattggttgactaggccaacatcaaagattaaaccccacattagcctatttctgatatgttattaatagtctagtggtagaataattcacaagtaataatttctggtcctccattttagaagtttgggaagttgatgaacagatcaagaagcaacaggaaacacttgtgaggaaagtcacatccatctccaagaaaattctgataaaggaaaaagtcattgaatgtaaaaaagttgcgaaaatatttcctctgagttcagacattgttacttcaagacaaagcttctatgactgtgactcacttgataagggtttggaacataatttagacttacttagatatgagaaaggctgtgtaagagagaaacagagtaatgagtttgggaaaccattttaccattgtgcatcctatgttgtaaccccctttaagtgtaatcagtgtggacaagacttcagtcataaatttgacctcattagacatgagcgaattcatgctggagagaaaccttacgaatgtaaagaatgtggaaaagccttcagtaggaaggaaaatcttattacacatcagaaaattcatactggggaaaaaccgtataagtgtaatgaatgtggaaaagctttcattcagatgtcaaaccttattagacaccacagaattcatactggggagaaaccttatgcatgtaaggattgttggaaagccttcagtcagaaatcaaatctcattgaacatgagcgaattcacactggagagaaaccctatgaatgtaaggaatgtgggaaatccttcagccagaagcaaaatcttattgagcacgagaaaattcatactggggagaaaccttatgcatgtaatgaatgtggtagagctttttctcgaatgtcatctgttacgctacatatgagaagtcacacaggggagaaaccctataaatgtaataaatgtggaaaagctttctctcaatgctcagtatttattatacatatgagaagtcacactggtgagaaaccctatgtatgtagtgaatgtgggaaagccttctctcagagttcatccctaaccgtacatatgcgaaatcatacagctgagaaaccctatgaatgtaaggaatgtggaaaagccttcagcaggaaagaaaatctcattacacatcagaaaattcacactggagagaaaccttatgaatgcagtgaatgtgggaaagcttttattcagatgtcaaacctcattcgacaccagagaattcatacgggtgagaaaccctatgcatgtacagtatgtggaaaagcctttagtcagaaatcaaacctcactgaacatgagaaaattcatactggagagaaaccttatcattgtaatcaatgtgggaaagctttcagtcagagacaaaatcttcttgagcatgaaaaaattcatactggagagaaaccattcaaatgtaatgaatgtggtaaagccttctctcgaatctcatccctcactcttcatgtgagaagtcacacaggggagaaaccctatgaatgtaataaatgtgggaaagccttttctcagtgctcattacttattatacatatgagaagtcatactggtgagaaaccctttgaatgtaatgaatgtgggaaagcattctctcaaagagcatccctttctatacataagagaggtcatacaggtgagagacaccaagtatattaaatgaaagaaggcctcttaaattcaacccatgttttacttaaaatatcttggcataagctcaaaaaagccaggatctttatggaaaaattttaatactttgttaaaaggtgtaagactggaataaatggaaagaaataccatatacatagatggaaaaacccagtattataaaaacctcaattctgaaaatctatagactgaatgcagttccaaacaaaatcaactaagaattttctaggatctttcaaaaatgattataaaattcatgtgaaatagaagtgtatgaattgctgcgacaattttgaaaagaatagaggaaacaccctcactgtatgatataaagttatagtcatttaaaaatgtgtgatattagtacattagtaggtaaatgagcagattttaaagaatagaatatccagaagcagattcatgaatatatgtgaactcagtgtatgttagacctgacatcatgaattagtagggaaatgatgacctagtcaataaaattgctgggaatatttgactctccgtattggagaaaataaaattacaacattacgacatactaaaaaatcaatattcttttttttttttttttttttttgagacaagcgtctcactctgtcgcccaggctggagtacggtggtgcaatctcagctcactgcagcctctgctttccgggtttttttgttttgttttgttttgttttttgtatttttagtagagacggggtttcaccatgttggccagggtagtcttgaactcctgacttcaaaagtgatcgccctctttggcctcccaaagtgctggggtttacaggcttgagccactgcacctggccaaaaaattaacattctaaaggatttaaatactggaatttgaaaagccaaactgtgaaaccattgggagaaaatagatgatattgtctatgacgttgaggccaaggagctttttttttttttttttcaagacaaaaggactctgtaattccacttctaggtatatatacatcctatagaaactcacaaataatgcataagaaatatatatataatatatgtatgtatgtatagccagatgcagtggcacatgcctgtaatcccagctacttgggaggctgatagaagaagataacttgaggtcaggagttcaagaccagcctgggaaacatagcaagaccccatctcttaaaaaaaaagaaatatatagacatatatctgcattgaaaacaacctaaatattcatcagtggggtaatggatgaataaaatatgatatattcaaatgatagaatagtatacagcacttaaaagcagtgaaccagatccatattgtgtaacatggatagttaaaacaatgttgaatgaaaaaaatcaaaatacaaatgaaacattgtgtaataatatttatgtaaattggaatgaaatcatttataaagaacaactgtttctattattgaaaattgtatgtaaaactatttaaaatagaatagaaggatacacacccaattattgatagcattgtctctggagattgaatttgaggctgttgattaaaaggagactttagctttgcttgtagtttttataccttaaaaagactggtagcatataaaataaatcttaaaagctaattatacacaatgacaatatgaatgtttacttgtaatagtgtttttcttgttctttctcacaacaggccaagggaagcctgtgcccatagaaggaaatgttataatggattcatatgccctatcagatgctcaactattttatgaaaaatctctctagaaaattagtaattagaatattcttgtttattatataatgtgaaattagcacattttagcaacttgatgatgctgtgtttttatattttaacatttctgaaattggactcctttcaactgatgatatcttagattcaagtaaatatttaattattaaaaatttgaaaatcagatgccagtataacaaatgaaatgtgtttttatttactagctccgggcatcatgtctactactcacggtgcctgtcctttcagtggagccagtattattagacagcaaatttattaggttcatagctaactaattaccaatatatttagagtattgtggagagattaagatttttcctgggaaagtgactttgcaatatttgttttcttgccctgtaattttccatacaaccagcataggcattaatatcattgttaattataacaatattttgaaatgagaaatcatttatttcctgaggtggccataagcaattgtgtaaaagtgtgttggttttaatctagagaccattttattctttttacaactcttgacttacacagcccatccggttttggttggaaatggtggtgaacttagaccctgagcactaatagtagagttcctcttgaagagtctcattctctgtaataatacatgaaccaacccttacagaggtgatgtttttattatgccatctctacaatattagttgatatacattacagaaagctgctaatgcctttttaaaaaggagatagggccagacgcagtagctcaagcctgtaaacccagcgctttgggaggccgaggcgggtggatcacctgaggtcaggaattcaagaccagtctggtcaacaggatgaaaccccgtctctactaaaaatacaaaaattagccaggcatggggcgggtgcctgtaatcccaactactcagaaggctgaggcaggagaattgcttgaatgcgggaggcagaggttgcagtgagccaagattgtgccactgcactccagtctgcgtgacagagtaagaccctttctcaaaaaaataaaaaataaataaaaaggagataggctgggtgtggtggctcacgcctgtaatcccagcactttgggaggcctaggcgggccgattacttgaggtcaggagttcgagaccagcctggccaatatggtgaaagcccacctctactaaaaatacaaaaattagctgggcgtggtggtgcatgcctgtaatcctagctactcaggaggctgaggcaggagaattgcttgaacctagaggggcggaggttgcagtgagccaagatcacgccagtgcacttcagcctgggcgacacagcaagactctgcctcaaaaaaataaaaacaatacaaaggagataaaaatagggggtgtttgtgaaaagggatctttagcttttatgattgaacattaactacatttgtttgaagttgatttcacaaaagtaaatctcagactaaagatgtgaagtacaaccatgactatcagttttgattgttattaggtatttttgaagactgatggtgacttaacaacagcagggactgacttcagtgaaaacaatgacaacttacccaaactgaaatatctaaatgagtattatcatttcgtagtcccttcttcaataagttttatactaaatccagttttgctagcatacccaatatttatgtgtaaactttttttttttttttgagacaaagtcttgctctgtcacccaggctgcagagcaatggcgtgatcttggctcactgcaacctctgcctccgggttcaagtgattctcctgccttagcctcccaagcagctgggaccacaggtgcgtgccaccatgcctggctaattttttttttttttgtatttttaatggagctggggtttcaccatgttggccaggctggtctcgaatcctgacctcaggtgatccacccaccttggcctcccaaagtgctgggattacaggtgtgagccactgtaccagcctgtaaacctttttctttttttggagagggggtctccctctgttgcccaggctggaatgcagcagcatgatctcggttcactgcaacctgcgcctcctgggttcaagtgattctcctgcctcagcctcctgagtagctggggctacaagctcccgccaccatgcccggctaatttttgtattttcatagagacagggtttcactacgtaggtcaagctggtctgtgagccaccatgcccagcctgtaaacctttttttaaaaaatggttttcgcatttcgtgtatccacacaagtaaccctgtataaatatttgtgagactttttttttttgtctaaacagttgtttttatctgtgattttctttttaatgttttttgtttgtttgtttgtttgtttttggcctgtactttatatgccttaaatcctctgcccctttctttacatagctttagagtcaacagagaaatgtaaaattccacttaaggcccataaggacaaccttagatttctcttttggcctctctcaccccagtaagactggctgaacctatcaggtgaggtaaagtgcctcagagtaggtctaaaagggcgttttactgatcttgtgtcagcaagcagatgatctggtctctgtaaattcattttttccttctgtcctaaggggtagaaataataagatagatataagtgactgagacagactttgaaaaaaatcattaattaaatcatggtgaattcttcttttcctggacacacatgagttactgcctagagagtttccattctagagttcaaacttcataagaggttcagttcctgtgaatggcctcaaaacacacagaataaaacatactaatagtggcttggactagacacagcagtagaaattgatagatttcagatacattttggaggtgattcaacataatgagttcatatgaaagatgaggagtaaagagataaaggataactcctatgtttttatggaaagaaactggctggccggtggaccatttgataaaaatgcagcaggctggggagaaatattttagagtaaaggttggggatggactcaagatgtgtgatggactttcttttcagctgtttcccagaagcaggctttgagatgaggattcctatgcaagtgatttattaaggaagtgctttcagtaagaggggtaagagaatggaggaagcagaataagaaaaagaagtaagtcaagggtgtgatcgcaggcacagtcctgccatggatggtgtcatcctgatccctgtgggaactcgagtgtaagctatgcctcagacttttcaagattccaccttcaggactgaggcacttgtgctgccaacttctgagaatcttggctgctgacaactcacagctaaattcctctaaggaattgctgttggacgaaaggagctgccttatgcaaggttacactgtctcccttcaggcagcttggcccacgttgcctcagtttagagcaactctgaagagcaatcccagctctagagctccccagggaacaaatttcaactgcatcagtttaatttctctttccatccagttctgctttattcatttccttactgctgatgttcccaagagatctccccaataaaccctatcatagatttccatctcagattctcttttcctgggaaactgacttaaaacagtagacattttgcaacagtagtcctcaaattgaaatttaaaaaaaacttttttttttttttgagacagggtgtcactctgctgcccaggctggagtatgtgatgcaatcttggctcactgaaacctctgcctcccaggctcaagcgattctcatgcctcagccttctgagtagctgggattacaggtgtgcaccaccatgctcagctaattttttgtatttttggtagagatggggtttcactatgttggctaggctggtcttgaactcctggcctcaagtgatctgcccaccttggtctcccaaattgctgaaattacaggtgttagccacagcacccaaccaaaaaatatttttgattcatttgaaactaataaactcattacatgttaatacaagcaataaatttttatgaaattattttatgaaaaagaattatttccaaaaccaaaaaacataataagagcgtcattgttacacaactttcaaatactttaaattacttaaaagtagacagctgggttctcatatctgcttctacattcagtcacatgtcatgtaagactgggaaactccattcttactcatgagcaaatgagatcaaaagaaggaaaaatatgaaaatagtttcaatctcaaggccccctagggatttccagactgttctttttttttttttttttttttttttttttttaaatggagtcctgctctgtcgcccaggctggagtgcagtggcgcgatctcggctcactgcaatctctgcctcccgggttaagcgattctccctgcctcagcctcccaagtagctgggattacaggcgcctgccaccatggctggctaacttttgtatttttagtaaagatgaggtttggccatgttggccaggctggtcttgaactcctgacctcaggtgatccgcctcagcctcccagagtgctgggattacaggcataagcccacacgcctggctcaaactgttctttaactgctgttgtgacatttggtgtggtttcttcaaaaacttgatgtcatgggctaaagaggtgtataaacaggaggctaaagggaagcatgggcaagctctctagaagtggtctcagatggaggacttgagaaacaaagaagatggataaggaaaatgttaaatatgtgggtaaatagaaacaaatattggcaggtggaaaagaagagcaagattgatttacagggttttcaaaggccatgaaagtactgggaaacaatggtatataattcagtggattggagtgggtttgatttaaagtatttcaagtctctttactattaaatataaagctaatttttaagattcagattttgaaggattgtaagagacccaaaagattgccttattgagttgaggaagttccctttattcctaagtttgctgactgtttttattgtgattgggtgttggatttttgtcaagtgatttttctgcatctattgacatgattatatgatttttcttctttagcctcttgatgttatgaatgagattaatagattttcaaaggttgaatcaatcttgcatttctgggataaatcccacttgattgtggtgtataattctttttatatattattggatttgatttgctaatattttattgagtatttttgcatctgtattcatgagagatattgttctgtagttttcttttcttgtaatatgtttctcctggttttggtattaggataatgctggcctcatagactgagttagggaatatttcctttttctagaagagagggtagagaattgataaactttcttatatgtttgggagcattaatcagtaaacccatctgggcctgatgctttctattttggaaggttaatagttattgattccatttatttaatagatacaggcctgtttggattgtctgtttattcttggtgagttttgacagattgtgtctttcaaggaattagtctgtttcatgtagattatcaaatttgtgggcataatatgctttatacgcttttattcttgttcataatattctttctttttttcttttttctttttctttcttttttttttttttttttttttgagacagggtctctctttcgcccaggctggagtactgtggcacaatcttggctcactgcaacctccacctcccgggttcaagcaattctcttgcctcagcctcccaagtagctgggattacaggcgtgcaccaccaagcccagctaatttttttgtattgttagtagagacagggtttcgccatgttggccagactggtctcaaactcctgacctcaagtgatcgaacctcctcggcctcccaaagtgctgagattacaggcgtgagccaccacgcccagccaggtggagtctttagattttcctagatataggattatatcatcaacaaaaaggcacaatttgacttcctcttttccaatttggataccttttatttctttctcttgcctgattggtctggctaggatttccattactatgttgaataggagtggtgaaagtcggcattgttccaattcttagtggaaatgctttcagattttccctattcactatggtgttagctgtgggtttgttatatataacctttattattctgaggtatgtaccttctgtgcctagcttgttgaagtttttattgtgaaagcatgttgaattttatcagatgctttttctgcatctattgagatgattatatggtttttgtcctttattctgatgtgatgtatcatgttaactgatttgcatacattgacccatctttgcatccctggtgcaaatctcacttgattgtggtgtattatcattttgctgtgctattggatttggtttgttagtgcttttttgaggatttttgcatctacctttgtcagatatcagcctttagttttctttttatgttgtgtccttctctggttttggtaataggatgatcctggccttgtagaatgaactggggagaattctctcctcttttattttttgaaatagtttcaggagaattggtattagtttttctttgtatggtataatttggctgtgattccaagtgaccctgggcttttcttggttgggacactttttattactgatttaatctcactacttagtggtctgttcagattttatatttcctcgtcattcagtcttggtaagttttatgttttcaggaatatatctgttttccctaggttttctagtttgtcagtatatagctgctcgtaagtctctgacactctcttgtatttctgtagtatcagttgtaatgtctccttcttcatttccaattttgcttatttgggtattctctcttcttggttagtctagctagtggtttatcaatttgggttatctttttgaataaccaacttttcattttgtggatccttcatattgttttagtctccatttcatttaattctgctctgatctttattatttcttttattttgctaatttgtggtttggctttttcttgttttctagttctttgaggtacattgttagagtgttaatttgtaattgttctacttttttttttttttttttttttgagacagagtctcctcgctctgttgcccaggctagagtgcaatggtgtaatcttggctcactgtaacctctgcctcccgggttcaagtggttctccagcctcagcctcccgagtacctgggattacaggtgctcaccaccatgcccagctaatgtttgtatttttagtagaaatcgggtttcaccatgttggccaggctggtctcgaactcctgacctcaggtgatccacccgcctcggcctcccaaagtgttgggattacaggtacgagccactgtgcccagctaacttttttgattgcattctacatttattgctataagcttccctcttaacactacttttgccttatttcacaggtttgggaatgttgtgttttcattttcggttgtttcaagaaactttcctttggcctggcatggtggctcaccatgtaaaaatacaaaaattagctggggtggtggcacttgcctgtaatcccagctactcgggaggctgaggcaggagaatcacttgaatctgggaggcagaggttgcagtaagccgagatcatgccattgcactccagcctgggcaacaagagtgaaactccatctcaaaaaaaaaaaaaatttttttttctttcaattttcattttaattatgatctttagtggttatttgggaatatgatatttaatttccatttattggtatagtttccaaagttcctcttggtgttaatctctagttttattccgttgtggtctaagatacttgataagatttcagcttttaaaaatttgttgagacttgttttgaggcctactcgatggcctattatggagaatgttccatgtactgatgaaaataatgtatagtctgcatctgttgggtgaaaggttctgtgaatatctgttaggtgtgtttggtctaaagtccagtttaaatctaattttttaaaactctgattttttaaaactgtctaatgctgagaatgggatgttgaagtccctcattattattgtaatgcagtctctctctttagatctagtaatatttgctttatgaatctgggtacttcagtgttggctgcatatatatttagaattgttatatccactgctggtttaatcactttatggttatataatgaccttctttgtctttttttttttttttaactctttttgacttaaaaactctttaatctattagaaatatagctactcctgctcacttttggtttccattttcatggaatatctttttccatccttttactttcagtctatatgtgtcattaccagtaaggtgagttttttataagtaggatatttggggatctttttaaaaaaaaaatccattcagccattctctattttttaagtgggaaatttaatccatttatattcaaagttattattattattatgagatggagtctcactctgttgcccaggctggagtgcaatggcgggttcttggctcactgcaacctctgcctcctcagttcaagctattctgcatcagcctcctgagtagttaggattacaggcatgcgctggcacgcctggctatttttatacttttagtagagatagggttgtgccatattggccaggctggtctcaaactcctgacctcaggtgatcctcccacctcagccttccaaagtgctgggattacaggcgtgagccactgacctggctaaaggttattattcacatacgaagctttgtctctatcatattgttaattggttagggtgtttttttttttttttgagacttctgggctcaagcagtcctcccacctgagccccacaagtagctccccatgcaccaccatgcctgggtaatgttttttttatttttatagagatggagtttcactgtgttgcccaggctagtcttgaactcctgggctctaatgatcttcccctctctggctccaaagtgctgggattacagatttaaaccaccatgcccaggcttttttgttgttttatgttttttttttttttaatttgttttcttattgtcactgtggcttggtagatttctgtagtagtaccatgtgagtcctttctctttcttctttatgtgtttgctttaccagtgagttttatagtttaccttattttcatgatggtaagtgttgcagtgtttttttttttttttttttttttgcttccaggtttaagacccccttgagcttttctttctttttttttttttttcgtttctgaggcacagtttcactctgccacccaggctggaatgtagtggtgtaatcttggatcactgcaacctccacctctcaggttcaagtgattcccgtgcctcagcctcccaagtagctgggattagaggcatgctccaccacacgtggctaatttttgtatttttagtagagacggtcttttaccatgttggccaggctattctcaaactcctgacctcaagtgatccacccgcttcgacctcccatagtgctgagataacaggtgtgagccaccacacccagccttcagcttttcttgtaaggccagtctagtggtaacaaatttccttagcatttgcttgtctagaaaggtctatttctcctttgtttatgaaggataattttgcttgatgtagcattcttggctagttttctttttttcttttagcactttaaatatatcatcccattttcttttgacctataaggtttctgcttagaaatcctctattagtcttatggggtttcttttataggtgactagatgctttttttttcttctaaggattcactctttatctttgtttgacttgaaacaatgtgaatataattgtgccatggagaaaaactttttgcattttatctccttgcatattgtgagccttctgtatctggatgtctgaatctcttgttaggctttggaagttttcatccataattttattaaataggttttcattgctaaataatggtaccacaatcacctgttaatgaatagttgtgttgtttccagtttggggactatcaagaataaggctaccatgaatatttgtgtaaaaattatttgtatagatgtatgttttcatttctcttggataaataccaaggattggattggctaggtagtatatggagatacgaattttatgaaaattcttaatttcagacctgtcaattcagtctcagtagcttcatttttcttagcttgataaatgatggaaatattaacccagtggcaattttatgtacgaacactgatgaatgtcagcagcactaggctttgggcagagtgccagaacaaatggcaaagcaaagcctcaacagctgctcctggggcataattaatgaccatgtcctaaagacattttagtgttaacatataaccagctgctgtttctcctgtaactaaatttaacaactgacagcaatatgaacagcgttttatgaaatactcccaatacagtctctattaaatgaatttggcagagggctatgctatgactggtgccctatttcagagttgttttttaacattggtaatatcttttcatgcattagaaaggcccaagttggccgggcacagtggctcacagctgtaatcccagcactttgggaggctgaggcaggcgtatcacgaggtcaagagattgagaccatcctagccaacatggtgaaaccccatttctactaaaaatacaaaaattagctggccatggtggcatgcgcctgtagtcccagctactcagaaggctgaggcagaagaatcgcttgaacctgggaggtggaggttgcagtgagccgagattgtgccactgcactccagcctggcaacaaagcgagactcagtcaaaaaaagtaagaaagaaagggtggggggagggacggagggagggagggagggaggaaggaaggaagggaggatggattcaagtcacataaacatttgttagatttgcttctgaacctttgtgaaatattactttcttgttacatagtgggcagtaactttgtaagatctcaggaaggaaggaaggaaggaaggattcaagtcacataaacatttgttagatttgcttatgaacgtttgtgaaatattactttcttgttacatagtggacagtaactttgtaagatctcctaagagaaggaaggaaggaaggaagggagggagggtccaagtcacataaacatttgttagattcgcttctgaacctttgtgaaatattactttcttgttacatagtggacagtaactttgtaagatctcctggtgtccagaactcaagcttgatttctgctgtttctgaatatctcttaaagaaacaagtactggaggcagagaataacccattaagtgttctctgaactatgaggcatctgagcctatctgatctttaagtcaaaataatgaagtgagccaggcatagtggctcatgcctataatcctcgcactttgggaagccagggtgggaagatagcttgagcccaggagttcgagaccagcctgggcaacatagtgagaccctgtgtctacaaaaaatttttaaaaaatttggcggacggtgtgacacacacttgtagtcccagctacttgggaggctgaggtgggaggatccttgagctcaggaggttggggctgcaatgagccatgatcaccactccagccttggcaacagaatgagaccttatctcttataaataaataaacataaaataatgaagtgaaagtcgatacaagaggtggtggagcttgtagcagatgacaaccatgtcccctgaggtgactgatacctccagtgttagaggtggaagagcatcacctctaaataaaaatgatcttctgcgctctcctagttgggacactagtctttggggacaagcaagtactataagagggacttgtatctatacaaagacttgtacaactgggcttgaaattttcattaagcatgtaaatgttatcccactttcttgggaatctttgattattgctatggtttgaatatttgtcgcctccaaaattcatgttgaaatttagttgccattataacagtattaagaggtggaacctttacaaggtgattagctcatgagagctccacactcatgggtgggattcatgctgttataaaaggacaagttgggcatgcttttatctctttgcctgtctgccttccatgtgaggacaaccatgtatcataaatatggccagtgagatacaagcaaaaatatttgggggtaatgggtatttgaaagcattttcttccttaatttaaaagggacataatcagccaacacagtcttttcccttgatttttgtcaacagcagagaccagcattgagtccctgatatagcagcattcccttttggaaccagctagccaccttatagaaggccgaatacactgggcctgttctgtcatggatgagacagagattcattcttataagcatggacagatattctggaatagattttttttcttgcccgtaatgctgctgccagcatcacaaccatggacttacagaatgctttcatgctttctccaccattatggcatccccccagttttgtgtgtgatcaaggactttttttttttttttttttaagagtcttgctctgtcatgcaggctggagtgcaatggcgtgatctcggctcactgcaacctctgcctcctggttcaagcgattctcctgcctcagcctcccaattagctggaattacaggtgcacatggccacactgagctaatttttgtatttttagtagagacaggtttcaccatgttggccagggtggtctcaaactcctgacctcaggtgatctgcccgcctcggcctcccaaagtgctgggattacaggcgtgagccatagcacccagcctgattacaggatataaggttaatatttaaaaatcaggccacgtgtggtgggtcctcaggcagatcacctgaggtcagaagttcaagaccagcctggccaacatggtgaaagcctgtctctactaaaaaatataaaaatcagttggaagtgattgtccatgcctgtaatcccaactactcgggtggctgagacacgagaatcgcttaaactggggaggtggaggttgcggtgagccgagattgcaccactgcattccagcctaggcaacagagactctgtctcaaaaagaaaaaaagaaatggggtcttgctttgtttcccaggctggtctccaactcctggcctcaaacaatcctcctgccttagtctcccaaagtattgggattacaggcgtgagccatcatgcctggtccatcttctcatttggatagctgtaccttgctaggtagaaatagagttgtttcattgttgtaaaggagctcaagttttgtataaaaaagtgtgtagaaacttagtacccaaagggttagactaggtcagttatcagtgtattgcctctcagctccaaattaaccttttcaacaccagtctgtgaaagtggacaacttgaagcatttctcctttacagtgagtgtgatattaagctttgtcagtagagggtgtggacattgaagagggacattgaaggaagaaggggtctttctggctcaggttgcagcattttgcttttccttgctcttgcttcatggtccatcagtgggaggtgtgtatgtgagaatattcagcgatgctctgcgccagctgtgctccagagcatgcagtctcttggagatcttgcatatctggcctgggcctggcagactaccttgctgaggcccttctcatgagagaccgtgtgctccagacctcatgctcacagtggcacccaaactcctctgcatcctggccatcagccgtagcttgcttgtgcaatggggagtaatttcctgtagctgtcctgatgtggaaaccatgcatctcaggcctaaggcctacagtgccactccaactctctttgagtacctggcaacgtagcaaacttctccagcatcacactgagctacaaccacattcagtgaggtttgaaactcacccttgggaaagacctccttccaagtatgttttcttttgggtactctccctcagctctaaagggccttttagagtcctcctcatggccctatagtttctgtcctatcattgcttaataattctttatattataattctgtttaaattcctttggccaggcacagtggctcatgcctgtaatcccaacactttgggaagctgaggtgggtggatcacctgaggtcaggagttcaagaccagcctggccaacatggtgaaacctcatctctacttaaatacaaaagttagctgggcatggtggcaggtgcctgtaatcccagctacttgggaggctgaggcacgagaatcacttgaacccgagaggcagatattacagtgagctgagatagcacccctgtactccagcctaggcaacagagcaatactccttctcaaaaaaaacaaaacaaacaagcaaaaaattcctttgtggtttctgtttcctgactgtatccagactgatacaaactgaccatagaagctggctgctgatgcttaaaaagcttctcatccatccatttctggcaaaagcccatcatcattcaccaagaccttcacacttaagctttccatgatacccaactgcttaaagtctcataaggcaggacagtttgccatcaaccaaaagcataatgagttgtttcatcacaatggtcctgtctccatggcagatcataatgtccacagtaaagaatctcatctttctctacaagataggtgtttttgccccattagtgcttggaatagaacactgggcatgaaggagaatctcaacaacatgaaaatgcatatctcttaacagtggtgttgtagtttcttgtgggctaaattgaaaacccaggaacaaaataaaaacttggttgtatttgaaattatcccataaaatatctaagatgtcctacaaagcatataacatggatcagttatccaacactgaagaataatatgtatatatgtgtgtcaactgtacaccataatatccatacatggtagaaagtccacttataaaatgtaatttcatgattcatatttatatgagaaaaatacatacaaatttatatgagagtaacacatattaatttacatgaaaatgtaacatataccttatattaaatatgcatatgggccaggtgcagtggctcacacctgtaatcccaacactttgggaggccgaggcaggtagatcacgaagtcaggagatcaagaccagcctggccaacatggtgaaaccccatctctactaaaaatacaaaaattagccgggcgtggtggcgggtgtctggagtcccagcttggacccaggaggcagaggttgcagtgacctgagattgcgccactgcactccagcctggcaacagagcaagactctgtctccaaaaaaaaaaaaaaactatatatatatatatgcatatgattgttaaaaaagaggagattcatatggtctgaagttatcatccctcaggttacttaccaattaaaaaggggaaaaataactacaatggagacatgtggccattaccatcttagccaagtgatcaaattggctcactgcctcaaaaaaaaaaaaacatgtttagtactgaagtataatgattcttgaatttattttcaaatggtagagagagaatcaaaagtggcaaattgttaaattgttgacaatttgtgaatctaagggacaagcatgaatgagttctttttttttttcttttcagagtcttgctctgtcccccaggcaagagtgcagtggcacaatctcagctcactgcaacctccgcctcctaggttcaagcgattctcctgcctcagcctcctgagtaggtgggattacaggcacgtgccaccatgcctgtctaattttttgtatttttagtagaaacgggctttcacggtattagccaagatggtctcaatctcctgacctcctgatccagccacctcagcctcccaaagtgctgggattacaggtgtgagccaccacacccagccccaatacaagttctttgtagtattctttcaatgcttctggagatttgaaacttgccaaaataaacaactgaagtaaatgtgcctaggaagtgggaaggcactgagcttattggggacatacccaaagaccccactggaacagaactaaagaaccagttctctgattcgttaccataagagaggaagtttcaggagaaggaatgcaaaagttctatatcctaattgaaagagagcgaaagaaaatatctcaagcaaggaaggacaggcttatcaaggatatagttttttgatgaatgacaggtcatcccaacctcttcctgctgagggaagatttcttcatctagatactgaggtcagaagtgtgaaatgagtcctgtgggctaaaatccaggtgtcataaaaccgtgttctttctctaggttctaggggagaatctatttccttgtcttttccagcttctagaagctgcctgcgttcttttgcttatggcactttcctccgtcttcaaagcacatccccgctttcgttgtcatgatttcctctctgactctgaccctcctgccttcctcttttaaggacccttgttgggcctactcagtaatccagcataatcttcccatctcaagatttttttttttttttttttttttttttttttgagatcaagtctcactctgccgcccaggctggagtgcagtggcgagatcttggctcactgcaacctctgcctcccgagtacctaggactacaggcatgcaccatcatgcctggctaatttttgtatttttagtagagactgggtttcaccacgttgtccaggctgatctcaaactccttacctcaagtgatccgcccacctcggcctcccaaagtgctggattacaagcatgagccacgatgcctggcctccatctcaagattattagttgaagcatatctgctgcagagcctcttttgccatgtaagatatattcacaggttctgggggttaggatttgaacgtcttggggcattattctaccactttgtcttattggcataatttatgaatttcttttttcccaatcctttgacataactatataaattttatacattattgaaatcagccttttatttggaacttttgcatctataaccacaaatgaaattaatacttttcttttggcctgtctttattgaatttcttttcttttcttttctttcttttggagacagtctcgctctgtcgcccaggctggagtgcagtgccccaatcttggctcactgcaacctctgcctccgggtacaagtgatcctccagcctcagcctccccagtagctggaagtacaggtgtgcgccaccacatccggctaatctttgtagaaagggggttttgccatgttgccgaggctggtctcaaactcctagcctcaaagtgatgctcctgcctcagcctcccaaactgctgagattacaggtatgagccaccatgcccggccatgtctttaataaattttatgccacttagacaaaaattcattggagagcatatataagttggatataaatacattgaataatcattattagttcaaaaattagctaaaattcagctataaccatctgggtatggtacctttttaattgtacatactttaaaatatcttaaataaaataaagcatttcattatggttattattctgttcagattttctacttcttagtagaaatcagtgatttaaatttcattagaaaatctacagtttcctctaccatggttatagagttgtacataacagcctcaaaattcttttaaacccaggcctgggcacggtggctcactcctgtaatcccagcactttgggaggctgaggtgggcggatcacctgaggtcaagagtttgaaaccagcctggccaacgtgatgaaacctcgtctctactaaaaatacaaagaatacaggcgggcacctgtaatcccagttacttgggaggctgaggcaggagaatcacttgaacccgggaggcagaggttgcagtgagctgagacggcatcactgcacaccagcctgggcaacaagagcaaaactccgtctcaagaaaaaaaaaaactcttaaactctttatgttttttttttcgcatttctaatgtttttgctttattttgctcttgtatatcagtcttgtgtttcatttatcttttagtactaaactgtggatttttaaattttggtccagtagtttgttttctagtttgtaaactagaaatacttaagaattttttttaatgaaatgttataagtaatgtttcacaagaaagaaacgataatggccaaaaatataagggactactttttaactgaaaagaaaaaaagtcacaattacacatcctagaagttaactgctgttaacaattaactttaaagatattattgcccaagtgcctatgtttctgctatttataactttgttttttttctttttgagacgcagtctcgctctatcgccaggctggaatgcacctccttagtagctgggactacaggtgcacaccaccacgccaggctaatttttgtatttttaggagagacgaggtttcaccatgttggccaggatggtctcgatctcctgaccttgtgatctgcctgcctcggcctcccaaagtgctaggattacaggcgcgagccactgcgcctgacctatttataacttttttttttttttgagatgaagtctcactgtcaccaggctggagtgcagtggtacagtctcggctcactgcaacctccgcctcccagattcaaggtattctcttagcctcctgagtagctgggactacaggtgcgcgccaccacacccaggtaaattttgtatttttagtagagacagggtttcaccatgttggccaggatggtcttgatctcttgacctcgtgatccgcccgccttggcctcccaaagtgctgggattacaggtgtgagccaccgtgcccagcctataacatttttaaatacagtatttattttaaaaaattggtttattttagtagcacttttagtaacacaaaagtgcttttattttagtagcacttttagtaacacaaaagtgctactaaaattggtttattttagtggcacttttccaggtcctaaagtatttctcgaacatacttctgtcattaaatatccttctgcaacttaatcctcaaataatgacgttgcagcccactatattggttttccgttatttccgctgcagacccaactatccctcatccttctccagtcccttcggcatcctgagcctgtgactgcgccccttcagtctctcctaggccacatccccaaacctctaggacaggtcgtttcccagacaccctccaggccagcctgtggcccggcccgagcagaaattagtgacttaaatgttgagatgccagaagacctggactggggcatgaattcccagcccaaacttagccacccggctttatcgggattgtggcccaggtcagtgaagccccaggtccgggccgactcctaattcgtggcgtggccgggagtcgccctctcctgatccaccccagagcgcggctccctgtggagggtaccctgggtggtccgctccctggctttttacagcacttgtgagaggcctttgggcacacacacaaaccccactccctgaccctccgtttggggcgagggcggctgcagccgggttaacttcgcggactctggaagccctggcggcgggcccggccgccccttcccgggtttgcggctacatttttctgaagcctccacggccccacagcctttttctagccgtcagcggccaactattgctgcctgggcctgtgtgtttgcccagttcctgggagggtgctcgggtgcagctgggcagtctggcctcggcttcactggaggcggggaactggacatgactgtgagcgccagtgaccgtggtgcggtccaggccccgggtggcgcacccacctctggactacatttcccagggggccccgcggccaaccttttccggccgaagaaggctagtcacctttccttggcgggtgttggaaagcaaagggctggaacgtcccgggctgcggagctcgctgggttgggatggactcgttcagacctgagtgctaggacgccgaagggggcggtgaggcgtcccggcgaggagctggggtcgtctggagtttaaaagacaggtggctctcggagatgtgcgggctgcatgcccacgcttcaccgctaggggaggtcagggctgtgcgatggggaaggaagagagtgtcggggcggtgcagtcgggatgggagaagggtgtcagggccactggcccccagctcggcagagggcagtgtcgggccgcgcgcaggcagggagtgggtgtggtgtgaggctggcgctggagcggtctgggaatgttaggaggtctagggtatcgcggccctgcgtcctcttgtctggactaaaagtccgggcagttctccccggacctggattgtgggcccagcgacaggtgcttggcgatctgtgcccgctgtgcctgcggggctgtggtgggagtcctgtctgcacggtattctgtgtggctgtgcatgtaagtgtgagcgtgtgccgggtcatcgaccccatctttgggaggcctgggagggggcgggacaccctcgctgtacattctggggatacgctgggcggggtctgccctgtggatgggtcctggccgtctacgcaaaccccaactgagactagtcagtaggtagtgaatctctgtgaatggccttccctccatcgggtctatctctggtgtgtgttgagggtggaaatggttctagagtttggggctgggaagtccctgctatatccacttctctgttctttcacccagtagccaccagggatctagacccataaaggtgcccccagcctaaaggacagcagtttgagaccctgacaggtgggtccatttaagctgtgtcttggcgccacagacttttgggctcagtgtaagacgctaggcctgaaagtttcccaagttaggctgttatggaggaagagggctacggtctggggggctctcccaggacttctctctgggctcctaaggtcacctgcatttctttgtgaggatgacagagagcggtggcgttgcagcttctttggtctccctttcagtgcctggggtggggcaggagtttggcctcccaaggggttcagggagggattcaggatggcttcttaacgtttttccacatctttctttaagaacccagaagaggagagaactgctgtgcgtctgaagtgatggcggaggtaagttgcatttgacattttcttggaaaggacttactggttttcaggacagtgtcctatttcagaaatttatctaaaatatttacattcatgatttggacaaaggggaagaggggaggaaactgcatttatgtagcattttcctaaagcagcctagggctgtctattttgcaaacattgtctcatctgatctagaatttccacttccctggattttattcatgctcacaacagtgttgacagagaacatgcctcagtgatttggcagggaaattgaacaacagaattagctttttcagtctcactgatttctgcattgtcccctccatgatcatatgcaatagcctttttgcttaccaattttttttttttttttttgagacagagtctcgttctgttgcccaggctggagtgcagtggtgtgatctcagctcactgcaacctccgcctcctcggttctagtgattcttctgcctcagcctcctgagtagccgagattacaggcacacaccaccacgcccagctaatttttgtatttttagtagagacggggttttgccatcttgcccaggctgatctcgaactccttaactcaggcaatccacctgcctcggcctcccaaagtgctgggattacaggcgagagccatcttgcacggcccgcttatcaatttctttctttctttcttttttttttttttgagaccgagtttcctctgttgcccaggctggagtgcaatggcacaatctcggctcactgcaacctccgcctcccaggttcaagcgattctactgcctcagcctcctgagtagccgggattacaggcacgtgccaccacgcccggctaattttttgtatttttagtagagatggggtttcactgtgttggccaggatggtctcgatctcctgacctcgtgatccgcccgcctaggcctcccaatggagccttgctctgtcgccagttaggagtgcagtggtgttatctcagctcactgcaacctccgcctcccaggttcaagcgattctcctgcctcagccttgcgagtagctgggactacaggcgcatgccaccacgcccagctaatttttctatttttagtagagacagggtttcaccatgttggccaggatagtcgcagtctcttgactttgtgatctgcctgccttggcctcccaaagtgctggcagcaggcgtgagccaccgcgccaagactttttttttttttttttttttgagacagagtcttgctctgtcactcaggctggagtgcagtggtgtgatctgagcgtgatctgagctcgctgcaacctctgcctccctggttcaagcaattcttctgcctcaacctcctgagtagctgggattacaggcgtgcgccaccatgcccagctagtttttgtgtttttagtagagatggggtttcaccatgttggtcaggctggtctcctactcctgaccttgtgatctccctgcctcggcctcccaaagtgctggaattacaggcgtaagccaccacgcctggcctcaatttcttataacctggaatgcctacctgtccactttatctccggatagtttttcaagatagaaataacctgaatgccctcttatgattaaagtgatatacaatttttgcaaaagtttcaaaatttgagggagtcacaaagaaagtttaagtcaccccatccgtggtcccactatccagatggtcactattaatgttttcagattattttgtctgcttatatgtgtagtcatgtgatttttttttttcagagtgggttcatactactaacagaagtagctaacttattgagcatgcactttgagccacttatagttggactttctttacagatgtgatcttgtttaatccacataacaaccctattagacaggtatgactatatttcattaattctctgatgtactttttctcacattttaatctctctgaaatcaaaatggggtttacaaaaattcttggcaagtcatagtttcattgatggcatttttttttctttcctagtatataaagttataagggccttattatcagtgacatctcagactcaatgaaatagagtattattctaagttgacaactgaggaaatcaagtcactcgcctcaaagttacgcagttaaaaatggtagagctggccgggtgcggtggctcatgcctgtaatcccagcactttgggaggccaaggcgggcggatcacctgaggtcgagagttcaagaccagcctgaccaacatggagaaaccccatctctactaaaaatacaaaattagccagatgtggtggcgcatgcctgtaatcccagctactcgggaggctgaggcaggagaatcggctgaacctgggaggtagaggttgtggtgagccaagattgcgccattgcactccagcctgggcaacaagagcaaaactccgtctaagaaaaaaaaagaaagggtagagctggggtttctacatcacctactgacttcctttgcccacttgtcaaagaatgctattttttaatttattttaaacaacatttcatatgttcagcatattttctctttgtcatttatacgttgttttagaaatattttttcacagttaatctattttgtgtgcttttagattcatttagttttcataaatgtattcagataaatcaactcttttcttaaaatttttccctttttgctgtgccagatggtctttcttaccacaaaaatagaatagttacttttatattttcctaaaatactttctgtcttttatccaaacaatctagtctttaaggtgtctcctgtgatatctcaccagagaatgttggctataaaattccaaatttggagtgtttatttagattttttatgcaactttggagtaatatattttaaagagtggcatggtatttgtaggatgtgaaatttaaggtttttttgttttgttttgttttgttttttgtcctggatatgtctggatgtagcacttacttcattaattctggccagtcctcaagaattactttcactctaagactaaagaaacatattttctattctgaattaatcagtttctttctctttgatttttcttcagaattctgtaagaatttgttgaatttctcttcccattactgtagaggccaaaaccttcctaagattatcagaagatcaccacaccctccccgtccatgccctgcacactggtggggaggaagcttcagttccccttgcacttcaacccttcattgtctatttctccctgtatcttctgtcctgaaaatattaattgccctttgtccctgctaatgggaggctgtgcattgtgatgaaagggtagaatcttagcccatttctgccatttgctagctctgtgaccatgggcttcctcataatttcagtttggggaatgtgatgataatggaaattcacctgcacttacactggcaacctggggtcccccagctcctaccttctggtctccccaacatccagtgaagtgcccaatttcattgcttcttttcttttcctgttctgtgagcttatgccctagggcctcactccactgtcttttgccttgtgggagtagatactacattgaactgattgggctccctggctccacttttactctttgccaataagataatccagtaatgtcaccttttgaattttgttcagtgaatccctggtactttcaggataaatctccaactctttcacgttcattgcatatttactaaaaagcatattctgtatttagcagagcacaaagcctaatgttggagtaaagtggtgagcaaagatgatgtgtttagtcctggcaggtataacctgtcattcaaaacatttcctgccctgattcctgtggagttctccaacatcacttctctctactcctccctcagaacccctcatcagctatcccagttaactttctgctcctcagaaacacagggtgcaattggtctcccttcttacctccatcttctgctctctctacttggagtgctgttcagtgtgttttctgcttgttggaattctgttccttttctaagtcccagttaatcttccacacgttacgtgaaactttccccacacccctcaatctgagtaggtcactattttcttatttcctatagcaagattcttcttttaatgggaggcaacgtatcctgcttaaaaacccctcagttaattatttcatctgtgagaacaagtttaaatgtctcaggattgatccttcttttcagcctcgtctctctgctctctctctgactttacactagtcgtgttaaactactagcagttcccagattgcacagtctatctcatgcgtccattgtgcaagaaacacaagaagggcatttatccctcaccacccctttctctgggttctactgaacctagtcaagaacagcatctatgaaacctgtgtcagtctcatggttgcgcttggtctcaattgctgtatctcttatagtcgttttcatactatattgtaactatcttttttttttttttttttgagatggagttttgcccttgttgcccaggctggagtgcaatggcgcgatctcagctcaccgcaacctctgcctcccgagttgaagtgattctcctgcctcagcctcccgagtagctgggattacaggcatgtgtcaccacacccagctaatttagtgttttttatagagacggggtttctccatgttggtcaggctggtctcaaactcccgacctcaggtgatccgcctgccttggcctcccaaagtgctgggattacaggtgtgaaccaccgcacctggcctttaactgtctttttaaaactgctttttattaaatattgaatagtagaacatgtgtaatatattaagggggactgaacacccatgttaagaggtagaatgctaatgttagaaatcccatgtgtgctttgatcttcccaatctaaatccccttctttagctgtcagaggtatctgttattccgaatcttgtgtttggcatttccttgtttttctttacagtcttaaccatatgtgtttattttcctgttctaatttgatgtcaagaaatcatactgtttggatttttctgcaactctattacttgtcctccaacgagtgttcaagagatccattcacattgcaaacttatcctactgtatagccatccattgtaagaatacattttttcatttatattgtgtacattactccagtgaacattcttgaactcctctttttgtatcctgtgcaagaatttctgtatgtaactaaaaaaggaattgctagctcataggttatatgcattttcagccttactcaacattgcccagttgttttctaaagtgtttattatactcatttactattccttttacttcgtatcctcaccaacacttggtattattaaattttaaatttttacgcacttgggtatgagttgatatgtattattttgatttcaaatttgcatattttggtactaaatgaggttgagccccccacccccgcaactttcatgctcattggcattcatgttttctcttttctgaagtacaattttatgtcatttctaatttttctattgatttttatatttccagagtttttgttccttttaatgctttgtatgcatttcttaaatattgtggattgtcgtccttgccggttatatgtgctgtgcatgctttcttactttaacctttaaatgatggtagatattctcaattttaatgccttcaaatttaatgctgttttctttaatttatttacatcttgtgtatgaaatctctcctctcctaagagtaaagatattatccctattttctataaatgatattattttgcctttaatgtttaagtcttcaattcacttggaattaattgtagggtgtggtatttccatttggataatatctgaaacatcatttattgaaaaggccattgtaaaggattaggcaaactgcaaggtctgagggaacagtccctacaagatgccgtcactcagacaccagctacaacttaagaggttcccatgaccactctcactttagaccagctagctacaaattcaggtatttccaccaccaccacccttaggtataataattcagtagaaagcctcacagaactcaatgaaagctgttatattcacagtcatatttataacagggaaaggatacattgggttgtattaccctcccagtattgatgtttggcagtacacccagagtattgtcaaccagagaagctcactcaagcttcagtgcccagtttttactgaagcttcattacataggcatcattgattgaatcattttccatgtgcacgaactcagtttccagcatctgtcctccctccttgcctgaaagtcaagctgataccacacggctcaaagtcccaagaccgattacatggtagaagtaggtgtggccagccccaagccctagtcatctcatgagcataaactaacagacgtggtcttaggggctcaccataaataacaaagacattcctatcactcaggaaattcaaaatgtttagaggttgcttcccaagagctgggacaaaggccagacctctttttggaggccacattccttactacacagtcctcctttctatgtacttcagtggcagttctgtcataaattaagtttccctatgtatatgtttgtctattctgggctctcctttctaatctgtccgtccgtttgtctatttaaaccatactgcctaaagactgctttctagtaatgtctgatatttggtaagtcacatgcctctactatggtcctgttctctagaaaggtcttagctgttcctaggttttggcttcatatacattttagaattggcttatcaatttctgtagaaatccagttgggataatgatttataatgcattaaaccttcgatcaatttggggaaagttgacatttttacggtattgagtcttcctctgcctctaaataactctgcttacttgagtcttgtggaatggttttcaataaatattttataattagagtcttacacatcttttgttaattttatttccaggtatttttatattttgtgtttttcttagatgacattaactttagaatatagactgggtgctgtgactcacgcctgtaaccccaacacgtaaggagaccgaggcaggcgaatcacttaagcccagcagtttgagaccagcctgggcaacatagtgagaccccatctctactataaataaaaaattagccaggcatgatggtgcatgcctgtagtcccagctacttggtaggctgaggtaggagaatcactcaagcccaggaggatgaggctgcggtgagctatgattatgccactacactccagcctgggtgacagagcaagacccagtctcaaaaaaaaaagtaaataaaataaaatataattttctcattgtttctggtatatagacttgccattgatttttttttttcttaaaactcctatgacagattattgcagttgattttgagatattgattttatatccccccaccttgcttaactcttatttattctgacgtcttgtagattcttttggatgtggggtcatccaacttgatcatatcattgatgaataaagatactttttggttgtaaataattgtctttgtctattagtattgatttcttttcttcttttttaacctttattttaattcttatcttgctgcactggctccacctcccagaacagttttgaatggtgaatatgggcaccctgtcttattcacagttttagatacttcacttttacttatgtttgcacttgttttttttgtaggtgtcctttatcaggttagggacgttgctttttattgctaattcgctcttgagtttttatcatgaaggaatattgcatttttaaaatgccttttctgcatccattgaattgattggtcaggtgtggtggctcatgcttgtaatcccagcactttgggaggcttagtcgagcagatcacctgagatcaggaattcgagaccagcctggccaacatggtgaaaccccatctctactaaaaatacaacaacaaaaaattagccgagcgaggtggcaggtgcctgtaatcctagctatttggaaggctgaggcaggagaatcgcttgaacctgggaggcagaggtttcagtgagccaggatcgcgccattgcactccagcctgggtgacaagagcaaaattccatctcaaaaagaaaaagaaaagaaaagaaatgatcctaagtgttttctctttaatctgttaacgtgcctaataattttaatttatttccagtatcatgtacacctttattgggaaaaacctaacttagccatgatgtgtgatgaatttttacatattactggattcagtttgctaataacttgcttagaattttaaatctgtggcatgtgtaagactggccagtaatttcaattcttcataatgtctttatacaagttactctatcccaggagaactgtggccttggcctgtgaaccaagattgttttctacatttttaaatggttgggggaaataatcaaaagaattatattttatgacacatggaaattatatgaaattcaaattttagtgttcatgaataaagctttattggaacataaccacattcatccatttatgtaacatctatggctgcttctgtgctgcatggcagagttgaggagttgcagcagagatggtatgtcccacagagcctaagatacttactatttggcccttgacaaaaaaagtttgctgacctctggtctagcctcataaaatatatcagttttccttttctttttcccatggtaggatctgggagtactcatgttatcaatggtgtgagcaaggccactcttcagattatttgtttattccctgtcttctatgccatttactacccgcatcctccccccgcccataaggcagtcgtgttaatgtgcatcgttttcttagtatgtattcattcatgcaaaatgtttttctcttttgttaaggtccagggtggtcagtttttcaaaatcttccatatatgattgagaagaatgttatttgaattgagtgcattgttctatatgcagccattagatcaagcttaatttagtatctaaatattctgtttttactgactttttgtctgttgtatctatcagttatttctagtgttttgttaaaatctgccactgtgattagggttcgtctattagagtttctatttcatttatgcatatgtgtatgtatatataatatgtatttattatttattaggtaagcataaaattatccttttctaactgtcatctttctgaatatttatgttttggatgtgtctctaataaccagcgtagagctgggctttggtttttgacaactttgaccaactttgtccttttttttttttttttttttgttgagacagagtctcgctctgtcgcccaggctggagtgcagtggtgcgatcccggctcactgcaacctccacttcctgggttcaagcagttctcctgcctcagcctcccgagtagctgggattacaggtgcatgccgccacgcctggccaatttttttgtatttttagtagagagggggtttcaccgtgttagccaggatggtctcgatctcctgacctcatgatccccccacctcggcctcccaaagtgctgggattacaggcatgagccaccgcacctggcgaccagctttgttctttaacgagagtatttagtcatttacagtgcttgtaattactaatataattgaaggtatcatttttgtgcttttaattctaccttttctgtatttcattatcttcatttcattttcccttctatgagtttgaaagttataagctatttgtgtttatttagtggttaccttgaaaatttcaatatactttcttaacttactagtgtctaaaactaaaaaatattattatattcttggtaaataaggaagtaggatatattctaactaatcaaacaacttacattattgtcaggtatttttcttctttttttaacccataagaaatttttattttatgtattgagtgttatcttagattatccatgtatttacgactttcttggttcaccattctttcttacatgtcaagctctccatctgggatcactttcctttagatggaattaaatagtaaatttctctctgattttggtgtttgttttttttttaacatctttatttgccctcatttgtgaaaggtgttttaccctcacactgggatattccgctgtcttctggtttacatttttgttattaaatagtcatctgtcaatcagacttttttttttctgtagataatctatctttaatctcaaattgcttttcacgtattctctttgtatttagtgctctgcagttttggtgtgattgtctaggcatggatttatttttatttattctgtttaagacttattgggcttcctgaatctgaataatgccaattctgaaaatttcttagctgtcctgtcttccaatactgccattttcttaattctttctcttttctccttctagaacttcagttaaatatctattaagccatctcacattatcttcttaatctctcttctgtacatctgctcatttgtctttttgaattgcattctgcataatctctttttataccttgcagtccagtaatttttctcttcagagagatttattccagccattgtatgatttaagtatgttttttattttatatttttatttcttttcctttttttgaaatctactgtcatctttgtgaagttttcttattacattgcttccattttaaaaacatgtaatatgcttgttttataatttttggcattatctgtataatatatgaatcttttacagaggtgattcctcctgcccctcaacattttattagggaaattttcaaaacataatgaaaagttgaaacaattgcatgactgattttcctgactctttgttcatggaattatgcctctttgcatgtttttgtttgtttgtttgttttgttttgttttgttttgtttttaagacacagtctcactgtgtcacccaggctggagtgcagtaatgcgatcttggctcactgcagcctccacctcccaggttcaagcgattcttgtttctcattctcccaagtatctgggactacaggtgcgcaccaccatgcccggctaatttttgcattttaagtagagatggggtttccccagattgaccaggctggtctcgaacccctgacctcaagtgatccgcccactttggcctcccaaagttctgggattacaggcatgagcctctacacctggccatttttttttaaatttgattttttgtttaggcaaaattcacataatatatagttaaccattttcaagtgcatagttcagtgacatttagttcattcacagtgtggtgctgctttatttttgactcataggttattttccttggaattctaccccatagattcttgaggcctgattgaaggttgttcctctagggcagatctgtgtttgcttctaccaggagccctgccaaaccaggaccaccataaagtaaacacatggcaagttttttagatccaccttagtattgttatgtgaactgcaggcctgtgtgagggctggcttgtagttacagttcctcagaggaaaatgtttcccttctgccatctgccaaggttccagtcaggcagttttcctagcggaccctaggaatgggaatgccacatctggttttcccttactctaagggcgtggttctagaggtcccaggtctttgtagtatggaattaattagaccccccaacttggccagctataggcttgatcttctctccacctgctccttaatatcatgaatgtcaaagcttatggtcttctgggctccatagacattccctgggcaaaataagcctcagtggctcagcttacccctctctgttcccattttgacatagttttatctgctgaagattactttacttctctgtcagctcatccttgaattctaaaatatttttgatattcaatctcttatttttcagctggtgatttggttgtagtaactagtcccccacagagcctggtgtcctatgattgattttctttttttcccccctccgtgactgagctttttaagaggaaatgcatgctaggtaagagttatctgcgaccctggtgcccacgtagagccagagtcatggggatttgattcgtattttcggataagagaattttgttgacacagctgctcctctcttcccattcccttccgcctttgatctcccttcatagactgctgtgatctgcagtgacaaacacagcagacctagcattttccgctcccctaagtgcaggggccagctgagggttctttcaaaggatcaggaaattcccaggttgcatctacaagagccagaagttagaaggcaaccagctgcagacttggttatttctcagtagattcagaacccagcattgccactgtaactgcagatttgagtaaatgacttctcttctccaagctaaagtttcctttcagttaggattcatgaccttctcatgaggattaatatatgtaaggcaccaggaacttaaagtgcttaaagaacaatgattgtccttgagatgcagtgtgcagtgtgcagtgtacagcagtaaggttaggggtagtagcaggagagaatgtcaggcaggaaggccatgggtaatctcggtttggaaccaggatgtactggccgtgaggattcctggaactgtggtttcatgcattgtgtatctgggtaattgagccctgctgaggctgctgagagcctgctgatcctgtgggttgtctggctcagtgctggtcattctggagagtctttgcagaatgaggttttagttttagttccaaaggccccagttctgggatatacgaacaaagcccaggaagtggctggtgcatagaacaccagaatttattcctctatctctattaggcttgagggaggctggaaccctctgttgtagaaatctttgtccagagctgggcctgcccaggtatcctgtgctcctgggccttgagggctccctcaagtctttggggtgccttcaagtctttggggtgccttccatggctgagggtctcagtgatatccaggttgtacaaaagggagcccaggccctgggctctgatcagctcctgacagtggggaagttgtttcttctgagtctgttattctatagttggattccctgggattcaagaaagacaaaggtttgttcattctttctcaaatctcagagagaaagaaaacacagactctgtgtgtgtgtgtgtgtgtgtgtgtgtgttggggtaccaaaagcagggatggggtgaagggattcattctcaggcctttggggaccttgaggtcagtctgatgaattttgtcaacaaaattctcttatccaaaaatatcagtcaaatccccatgacttgctttttcttccttttttgctttctcaggctttctctaggagaaacctagggtataaattttgtagttgtaaaagctattatctatgtgttagtatgtctcctctccttcattgaatgcattctttcatttttaaattttttatttttatttttgtagagatggggtcctgctatgttgcccaggctggtcttaaactcctggacccaagcgatcctcccacctccacctcccaaagtgctaggatcacaggcatgagccatcacacttggcctgaatgctttcttttctgttttttattttaattaacaatgtattagtcccttctcgcatgctataaagaaatacctgagactggggattttataaagaaaagaggtttaattggctcacagctccagctccacaggctgttcaggaagcatgatgctggcatctgctccgcttctgggggtgctcaggaaacttaccatcctggtagaaggcaaaggagaagccagcacttcacctggccagagcagaaggaagcagggaaggtgcgggacacttttaaacagccagatctcgtcagaacttactatcatgagaacagcaacaagggggtggtactaagccattcatgaagtattcacccctgtgttccagtcacctcccgccaggccctccctccaacatcagggattagaaatccacatgagacttgagtggggacacagatccaaaccatatcagacacattgtaatcctagcactttggggtcatatttatggggtacaatttgatgtttcagtacatatctatgtggtataatgagccagtcagggtagttagtgtatctatcacctcatgcatttatcatttctttgtggtaagaacattcaaaagcctctcttctagctattttgtaatatacaatattttattgttaaaccatagtcaccctactgtgcaatagagcaccagaatgtattcctcctgattgtaactttgtacccactgaccaacctctcgcgttttgtacccccaccccgtctctggtaactactgttctgctctctgcttctgaacgccttctttttgctttagaagatttgaacagattgaacagatttctttttcctaaaacttcttggcttccccagggacttgttccccagttcttcccattccagtcagtaatgctatcaaagactgctatctcttttattgattgattgattgagacagagtctccctctgttgcctaggctagactacagtggcatgatcttggctcactgcaacctctgcctcccaggttcaagcgatcctcctgccttagcccccctagtagctgggattacaggcacgtgccaccatgcccggctaatttttgtatttttagtagagacagggtttcaccatcttgaccaggctggtctcaaactcctgacctcaggtgatccacccacctcggcctctcaaagtgctgggatttacaggtgtgagccaccatgcctggccaaggctgctgtctcttaagggcccctctgttctccaagaagtgtttaggtatttatcagcaaacctcttagcatttataagtttctttgagacaacatcttgcttggtcacccaggatggagtgcagtggcacaatcatgggtcacttcagcctcaacctctggggctcaaagagctcctcctgcctcagcctcccaagtagctgggactgcaggtacatgccaccttgtccggctaattttggatttttttgtagaaacgggatctcactgtgttggtcttgaactcctgggctcaagcaatcctcccaccttggcctcccaaagtgttgggatgacaagagtgagccactataccaggattagcattttttagatgcatgttcttccaccgagagtactgatggagtaggaaaaccaatccttgctggaaactttcatacctcccttcttggagctgtgatttgatgaagtggaaatgaatggttaagtggaatcacatattgcaaacttgagttttctaattagacaagaaaggaattgatgttgatttattgtgttgcagtctcagtatcagccagtatctctagctgtctgaggattttaggactggggatatcctgagatatgtagattgtatggagttacagtgtattcccaaggagtctgtgccagatggataaagtgtgtccattttgaacttgtgtagtatgtgcgcacctcgtgtgacatcgttgtgagtctggatctttctccatcagttctggtagctaaggaacaaggagagtatggttggggtcatttgtggtaacaggaacaatttagccagatgtataaattgttgagaaatgaccaggcacggtggctcatgcctgtaatcccagcactttgggaggccaaggcgggtagatcacttgaggccaggagttcaagaccagcctggccatcatggggaaactctgtctgtactaaaaatacaaaaattagccagatgtggtggcccatgcctgtggtcccagctactcaggagggtgaggcaggagaatcgcttgaacctgggagacagaggtagcagtgagcggagatggtgccactgtactccagcctgggcacccaagtgagactctgtctcaaaaacaaaaaattgttgaaaaataatgaatgactattataactgcaaaagaacctttagaaaacttctccaacctacttcctcaaaacaagaacattgtatatattatatgaggaatcatgcagccagtaaaattgctgtctatttaagaatttttggtgatgtagaaaactgattcaggatttaatttattgaatgggaaagaggaagaggcaatgagaagtttgtgtgcttaacatagggtgttccgtgtacttgcacgtacagtttcatttaattgggaaacaccacttacatggacttagtttattctctgacctgggtagataatggaagtgcccagaggctacctttgcaggagtaagcatgcccaagaaccatgtgggcacttcactctgatcacccctgtttccacaccgacccctccatgttgaaggagccagtatggcctgttttcctaatggaacttccctattgaattgctttctccattttcttttatgttgtcttaaagattttgtccatgaatttcacaaatggtgtatttatttttggtttcagggcttgaagttcaaagatgtggtcatttacttctctcaaaaggagtgggaatgcttgcactctgctcagaaggatttgtaccgagatgtaatgttggaaaattacggcaacctggtcttactgggtaactttatctgcccctccgtacaccccctgccccgccaaacacacaattggccttctggaattcttatgttcttttttctgagtttgtcccaagtgcttttcaagtacctggatgagttaatgtttcttgctcaccaaaagaatggtttgtctcttgtgaagttggaaattggctgttccagcaggcacctttatcttcattattttcatacctcccttcttggagctgtgatttgatgaagtggaaatgaatggttaagtggaatcacatattgcaaactttttttctaattagacaagaaaggaattaatgttgatttattgtggtgctctgaccctcactccttcttctgacccttaatctacctgctcctctttcttggtaattagggactgatttttaattctgacacccacaacaaaaccttgttccctttgtttttgagcagggctttctgatactaagccaaatgtgatctccttattggagcagaagaaagagccctggatggttaagaggaaggagacaaaagaatggtgtccaggtgagtgacgatgaactggaatggggaggccatagcaggtggtcacttagctcatctgtgagaaggcagcacttcagggattttggtaggaaagctgcctaaaaaggcttgagatctggggaagaaagtaaggatgttgtaatcccagcagtttgggaggctgaggcgggcagatcacaaggtcaggagttcgagaccagcctgaccaacatggtgaaaccccgtctctactaaaaatacaaaaaaattagccaggcctggtggtgcgtgcctgtaatcccacctactcaggaggctgaggcaggagaatcacttgaacctgggaggcagaggttgcagtgagccaagattgtaccactacactccagcctgggcaacagagcaagactccgtctcaaaaaaaaaaaaaaaaaaaaggaggccaaggcaggcggattacgaggtcaggagttcaagaccaacctggccaacatggtgaaaccccatctctactaaaaatacaaaaattagctgggcatggtggcaggtgcctgtagtcccagctacttgggaggctgaagcaggagaattgcttgatcccaggaggcagaggttgcagtgagccaagatcgcgccactgcacttcagcctgggtgacaaagcgagactccatcttgaaaaaaaaagaaagtaaagcatgtttcagctccatttactaggctctcttgctcacctcctataatacctcccccctcatttcagagaggaagtaccctctttctttccctgtgacaaccattttacttgcattttgggtccagttttgtcctgactttttaaaacagttttattgagatatcataaaattcatccatttaaagttcagtaatttttagtcagttcacaaccatcacaacagtctaattgtagaacatttgtatcactcaaaatgaaacgccatacccattagcagtcactccccaaatccagccctaagcaactactgatcactttctgtctacatagatgtgcctgttctggacattttatattaatgatatcacacaacatataatttatgactggcttttttcacttaccagaatgttttcaaagttcatccatagtgtaacatataccagtgcctcattcttttatattgccaaatagtattccatggtatagatattaccattctgctcattcatcagttggtagacatttgggttgtttctacttttaggctattttgtatgactaaagctgctatgaacatttgtatataggttcccttcttttcttcgtttgttgagtatttttgtcatgaaaggattttagaatactttttaccattactttttctgcatctattaagacatctgtagtttatgtcctttgttgtatgaatatgtttgattacattgataacttttggatgttgaacctaccttgcatttgtaggataaattttacctggatgtggtatataatcctttatgctgttggatctggtttggtcttttttgttgaagatactggtctgtagttttcttgtgatatctttgctttgtctggttggtatcagggtaatacaggcctcagaattagaaaatgtttcttcgtcttctgtctttttgaagtgttcatggaggatttatattaagttttctttaatgttgggtaagtgaggccatttgctcctcggcttttctttatgggaagatttttttgctctaattcagtctctttatttggtataggtctattcaggtattctatttcctcttgagtcaattttggtagttttgggtctttttaggaatttgtccattttgtctaagttatctaacttattggcatatagttattcgtaggagttccttataaccctttttatttctataaggtcagtggtgatatctcctatttcattcctgatgttagtattttgagacttctctctttttttgttggtcaatctagccaaagatttgccaattctgttgatcttttccaaagaccaacttttggtctcattgattttctctgttgtttttctattctctattttgttcattgctgctgtgatcttttattatttccctccttctggaagctttatgtttttgtttattctttattatctggttccttaagatatacagttagattgttgatttgagatatctctgtttttttttctttttttttttaatataggtgtttttagctgtaaatttccctttaagccctgctttagctgcatttcataagttttggtatgttgacttttcatttatctcaaaatattttttaattttcttcatgatttctttaacacgttggttatttaggagtatgttatttaattttcacgtttgtgaatttcccagatttccttctgctgttgatatctaagttcattccattgtagttgcaaaacatattttgtgtgatttcaatcctcttacatttattgagggctgttttatggcttaatatatggtctaacctgaaaaatgttccatacatgcttgagaaaaatgtgtattctcctgttgttgagtggaatgttctacaaatgttttcttaggtttaattggtttatagtgtttttcaagcaatctgtttccttgttgatcttctgcctagctattctatccattattgaaagtaaagtattgaagtcttcaatttgttcaattgtttgtggctctctttaattcttgtgttacatattttgggcctgtgttattaggtgtatatgtacttacaactgttacagttttctgactatcattatattctcttatcattataaaatatccttttttctgatttgtgtgttgttgttgtttttttctgagatggagtctagtgttgttgcccaggctggagtgcagtagcacaatctctgctcactgcaacctccacctcccaggttgatgtgattctcctgcctcagcctcccgagtagctaggattacaggtgcccgccaccacacccagctaatttttgtttcactgtgttggccaggctggtcttgaactcctgacctcgagatctgccggcctcagcctcccaaagttctgggattacaagcgtgacccaccgcgcccggccaaaatatccttttttctcactggttacaatttttgtcttaaagtttattttgtctggtattagtaatgctattttacctcatttttggttactctttgcatggtatatctttttccattctttcatttcaactatttgtgtccttgaatctaaagtttgtctcgggggctgggcatggtgacttacacttgtaatcccagcactttggaaggccgaggtgggcagatcaattgaggtcaggtgtttgagaccagtctggccaacatggcgaaaccctgtatctattaaaaatacaaaaaattagccaagcatggtggcccgtgcctgtagtcacagctactcaggaggctgaggcatgagaatcacttgaacccagtgagtggaggttgcaatgagctgagatcacgtcattgcactccagcctgggtgccagagtgagactgtgtctcaaaaacaaacaaacaagcaaaaaacagtgtgtctctggtagattgcatatacttggatcacttttttttaatccatcctgccaacctcttcttgtagtgcttaacaaactctgtagtgtttaatatgtttacatttaatacactgatggggtaggatttacaattggtattgtggtatttgttttctatttgtgttgttattgttttattcctctattcttccattactaccttctgttatattacatgaatattttctagagtaccatttttgttcctatattgtttcgtatacagtagtctttgaaattattttcttagtggtcgccttcaagattataattagcatttcaacttaaaacaatctagtttggattaatactagcttaactttaatcttacataaatactttgctccaaaatacttctgttcccacctctcttctttgtactattattgtcatacaaattacatatttatacattataagccaatattggcaggataataaccccctcaaagatgtctatatccgaatctctgaaacttgtgaacgtgttactcttacatggtaagggggaattcaggttgcaaatctgctcaacttcaattagggagaggatcttaggttatccaagtgggcccagtgtaatcacaagggtctttaaatgtatcagagatgtggctgggtgcagcggctcacacctgtaatcccaacactttgggaggctaaggtgggcagatcgcttgagcccaaaagctcctcgttttctcatttttcacttccctttttttttgtaattgcagtgtaaagaattgcttattaactatttttattttgtcatttctactttcaggacttttctttgtcctgcaatgtgaaaatacctcctattttctttcttattattttgcagattgggagtttggaagagaaaccaagaatttatctccaaaggaaaacatttatgaaattagatcaccacaacaggagaaggccagagttatcagagaaatcagatgccaggtggagagacaacagggtcatcaggagggacatttcagaccagctgtaataccatttacttccatgcagtgcacagcccatagagaatatcagtggcttcatactggagagaaatcctgtgaatgcaggaaatgtaagaatgcttttaggtaccagtcatgtcctattcaacatgaaataattcataataaggaaaaagaacctgaatgtggagaatgtaggaaaatctttaatagtggatcagacttgattaagcatcagacgcttcatgaaagcaaaaaacatagtgaaaataacaaatgtgcctttaatcatgattctggaattactcaacctcagagcattaatactggagagaaacctcataaatgtaaggaatgtgggaaagcctttcgttccagctcacaaattagtcagcatcagaggatgcatcttggtgagaaaccctataagtgtagggagtgtgggaaagcctttccatccactgcacagcttaatctacatcagaggatccatactgatgagaaatactatgaaagtaaggcgtgtgggaaggcctttacccgtccctcacacctttttcgacatcaaagaatccatacgggtgagaaaccccataaatgtaaggaatgtggaaaggcttttcgttatgacacacagctgagccttcatcagataatccatactggtgaaagacgctatgaatgcagggagtgtggaaaggtgtacagttgtgcctcacagctgagtctacatcaaagaattcatactggtgagaaaccccatgaatgtaaggaatgtgggaaagcctttatctctgattcacatcttattcgacatcagagtgtccatactggggagaaaccctgtaagtgtaaggaatgtgggaagtcctttcgtcgtggctcagaacttacccgacatcagagagctcatactggtgaaaaaccctatgagtgtaaggaatgtgaaaaggcctttacttgtagcacagaacttgttcgacatcaaaaagttcacactggggagagaccccataagtgtaaggaatgtgggaaggctttcattcgaaggtcagaactcacacatcatgagagaagtcacactggtgagaaaccctacgagtgtaaggagtgtgggaagccctttggtggtggctcagaacttagttgacaccagaaaattcatactggtgagaaaccatatgaatgtcagcagtgtggaaaggccttcattcgggcctcacaccttagtcaacatcaaagaattcattcaggacagaggagtgaatgaagaaatgagggatggctcagaatttgattgacatgagaaagttcatactgatttggaaaaaaaaacttatgattctaagtgtgagacaccttataaatgttaggaattagcagggatttatttatgtttcagaatttattacacatcatgatacaactggtgaaaaattgaagacctccatgaatgtaaagaaagtagggaggcctttttggtggctcagaacgaagtcaacctcagggaattcaaatgggggagaggagggcagtgaatatgctgagaggagttaatcattcagacctttatcagcagcagagtcattagcccttaggggaaatcagatgattcaaaatataaatgcaggccgggcccggtggctcccgcctgtaatcccagaactttgggaggctgaggtgggtggatcacaaggtcaggagatagagaccatcctggccaacatggtgaaaccccgtctgtattaaaatgcaaaaaattagctgggcatggtggtgcgcgtgtgtaatcccagctacttgggaggctgaggcaggggaatcacttgaacctgggaggcagaggttgcagtgagctaagactgacccactgcattccagcctggcgacagagcaagactccatctcaaaaaaaaaaaaaattattattatacacacacacacacacacacacacacgctgggcgcagtggctcacacctgtaatcccagaactttgggaggccgaggtgagtggattgcttgagtcctggagtttgagaccaacatgggcaacatggtgaaacactgtctctacaaaaaatatttaaaaaattagccaggtgtggtggtgcatgcctgtaatcccagctacttgggaggctgaggtaggagaattgcttaagcccaggagacagaggttgcagtgagccaagatcatgccattgcacagcagcctgggtgacagagcgagactcttgtctcaaaaaaaaaaaacaaaaaaaaaacacaaaaaaacggggccgggcacggtgcctcacgcctgtaatcacagcactttgggaagctgaggcgggtggatcacttgaggccaggagtttgagaccagcttgaccaacatggtgaaaccctgtctctactaaaaatacagaattagccaggcatggtggcgcacagctgtaataccagcaacttgggaggctgaggcatgagaatctcttgaacccgggaggcggaggttgcagtgagctgagatcgtgccattgcactccagcttgggcaacaagagtgaaactccatctccaaaaaaaaaaaaaaaagaaagaaaatgtaaatgccatatatatgggacaccaatttgctttagctaacaaagtattcatctgacaatacttgaggaaggctagagtagtatttaaaatgcagcagattctttcatcccacataaatcttgttaaatattcacgagctaattctctaaaattaactggagctgaatcaatgtggggaagaatttaaccaatgtttagtttttactcacccttatcattattactcatttcttttagggtgaatttattaactacatctacattttctcatttataaaatagtactgttagcaccatatttcttagctgcattgtgggggttaaatacatttatattatttaaagcagtgtctgtctagtattgaaagtgtgctaaatgaaggcgtttattgtttttctttgttattttcttaatcatgcattattagacatgagaggaaggacttatatttgcagtgactataggaacatattgcatcatctctttttctttattgaaggttaggtaattccttctggagaaaaatttaatactgtgaagcctttatttatagctcacccttttgccttactaggcaaataatgtgaagaaacccagtagaataaaagtgggttgctgtgaagtcaggcggaagatttagatatttatcaaaacttttcaaaaggctgggcacagtagctcaagcctgtaatcccaggaatttaggaggccgaggcgggcagatcacttgaggccaggagttcgagaccagcctggccaatgtggcgaaaccccatctctactaaaaatacaaaaaataagccaggcacgatggcgtgcatctgtagtcccagctacttgggaggctgaggcaggagaatcacttgaacccaagaggcggaggttgcagaattaaaaaaataatacagccctagccaaaatgtatttctccactagaaaattttaaagctacctgtataaataatttttatattaaaaaggatatcggcctggtgaggtggctcacgcctgtattcccaacactttgggaggccaaggcgggtggatcatgaggtcaggagatcaaaaccatccttgccaacatggtgaaaccccgtctttactaaaaatacaaaacttagctgggcgtggtggctcacgcctgtagtcccagtagtcaggaggctgaggcaggagaacagcttgaacccggagtgggaggttgtagtgagccaagatcgcaccactgcactccatcctaggcgacagagtgagactccgtctcggctgggcgcggtggcttacgcctgtaatcctagcactttgggaagccgaggtgggtggatcatgaggtcaggagattgagaccatcctggctaacaaggtgaaacctcatctctactaaaaatacaaaaaattagccaggcctgtggtgggcgactgtaatcccagctactcgggaggctgaggcagaagaatcggctgaaccggggaggcagaggttgcagtgagctgagatcgcgccactgcactccagcctgggtgacagagcaagactctgtctcagaaaaaaaaaaaaagatgtcaaggcaggccttattaggaatgaatgacaaagggaacactacatatggaaatttatagggtgtgaacaaagctatagtctcaggaaaattattttaatatgtatagaaaacagggccagttaaggactaggattcattccgacttcaccctgtgtgctcctgttcctagcaggttctcagtaaatatttgatcataggaatgtgtgaatgatccaaggagtgagagagtgaatgaataagcattcaacccttggatgtagaaaagctctaggaaaattaatggaaggcaaaaacaaaacacaaaactttgaaatgaaaagcattgcaccctatgaagaagaaactcaagcatagttgcctgttcattggtgttaaccactctccttttggcaggattgcctgctgctcttctgaatctgtaaatgccagatatttgatctcctagcttgccctgcatctggtcacacatataatagccctggatacggaagatctgtgcaaaagtctgcaaatgggcttcagttaaattttgtttcctaacaaaatgggagaaaatggtcttcttcaatacaagatgcatgtctgtatgtcagcgtgatacctggaattgtggccattttgcaagcagagaatcaagagtctgagactggcacagaataggttggaattatgtgtgtccttgacatttttgttttgttttgttttgttttgtttttgtttttcagacggagtcttactctgtcacccaggctgtattgcagtgatgggatctcagctcactgcaacctccacctcccgggttcaaacgattctcctgcctcggcctcccaagtaactgggactacaggcgtgcgccaccatgcccagctaatttttatatttttagtagagatgaggtttcactatgttgaccaggctggtctctaacttctgacctcatgatctgcccgccttagcctcatgctgggattacaagcatgagccaccactcccagccaacattgttgatatgatgaaacaatgaagaactgccctttccctggacttggtgcgaaataagaaactgcaggagtatgttgtaagtttatttttatttttatttatttatttatttgagacagagtcttgccctgtcgcccagactggagtgcagtggcacaatctcgactcactgcaacctccacctcccaggttcaagcgattcttgttcctcagcctcctgagtagctgagactacaggcgcctaccatcacgcccagctaatttttttctatttttggtagagacagggtttcaccacgttgcccaggcagatcttgagctcctggcctcaagtcatcagcccgcctcagactcccaaagtgctaggattataggcgtgagccaccgtgcccacctgcatatgttgtaagtttatactccactttttacaatatatctgaggcctggaaagttatttttaaagacatttttatatatacacacattcaactttcgtaaagtttatattcagctttttatagtacatctgacattgtagaaaagcattttcttatatatagttgaaatatatattcaactttgatttagtaaagtatatgaaaaacataatttacattcagcattttatagtgtatgtttatattcagctttttatagtatatgtgaaatcctagaaaagtattattttcctgaataagaaccaggaagaaactgattaaagagctataccacataatttctctagtactagattatcttacagtcttctacctcttcaagatacaaaagtcatggctgtgaggctatcattacccttttaccaaagttggaaaaggacagcatccaaaataagtcagctataaaaaaaagtaaagtcggccgggtgcggtggctcatgcctgtaatcccagcactttgggaggctgaggcaggcggatcacttgaggtcgggagttcgagaccagcttggtcaacatgatgaaaccccttctctactaaaaatacaaaaactagccaggcgagatagcacgtgcctgcaatcccagttagtcaggaggctgaggcacgagactagcttgaacccaggagacagaggttgtagtgagctgagatcgcaccactgcattccagcctgggcgccagggcaagactctctcagggaaaaaaaaaaaaaaaaaaaaaaaacaaaaacctgatgtgtatgcttccatgctttgcccacactaaagaagcatacccacagctagatttgttttggtaccataggaggtttcaggttggggagagtagtttgaatgacatcgtgcatacacattgaagtgtcatctcctctcctcacttggtaacataccagggacatccttcaaattaatacctgtagatcaaactagcttgaaattcttacataatggagtagttcccccttatccctggttttacagtatattgttttaattgttctattattggctattagttaacttataagttttatcataggtatctatgaataggaaaaaagcatagtatatgtagggtacagtactctatacagtttcaggcatctactggggatcgtggaacatgtaccctgcagataaaggactattctatagacaaaccatatgcagcccatttttccactaatgaaagttcagattggggccaggcatggtgctcatgcctgcaatcccagcactttgggaggctgagccaggtggatggcttgagcccaggaatttgagatcagcctgggcaacatggtgaaaccctgtctctataaaaagtaaaaaaaaaaaaaaaaaaaaagtcaagtgtggtggtgagcacctgtagtctcagctacttgggaggttcagggtggagaatagcttgggcccaggaggttcaggctgcagtgagccaagattgcaccactgcacaccagcctgggtgacagggtgagacctgtctcaagaaacaaaaaattcaaattattttaccaataattatacaccaaacagttttgttgtacatatattgttgcatgttgtacttttatatcaataaagtaggtggagtcctaccagttgaattccttgcctacaacatagtggatttaaaatatattcattaatgccttattattgtctgaaatcattaatcttaatgggaatttatgtccatttcctgacaaattcaaccaggactgaacttttttttatgttgggtgaaggaaaagaaaaagtgccttcaattttcttttcttttctttttttttttgagacagagtctcactctcggcaggctggattgcagtggtgcaatctcagctcactgcaacctctgcctccctggttggagcgattctcctgcctcagcctcctgagtagctgagactacaggtgcccaccaccacacccagctaatttttgtatttttagtagagacaggagtttcaccatgttggccaggatggtctcaatctcttgacctcgtgatccacccgcctcagcctcccaaagtgctgggattacaagcgtgagccaccgggcctggcctgcattttcttaactgccagtgagattgagcatctaccatgtctaagggtcattcgagttctgtttctgtggattgcttatttttatctcttccttttgtttacattggagtagtttttaaagcaatctgtggaaactttgctaaggagattgtattgtcatatgctctgcagtttagcctgcatcttttgccatcgtttatggcaaacagagttaacatatttttctgtgaagagccagatagtaaacatgcaaggctttgtaagccatacagtctctactctgtctttgtagtgtggaagcgcttaatacataagccaggtgttctcaaacaggggccatttcgtttctcatacctacaccccagtaggcatttggcaatgtccagagtcatttttggttttcagtatgaagggtgggtgctgctggcgtctggtgagcagaggccagggatcctgctaagcgtcctacaatgcatagtacaactgcccccaccccccaaaaaaagtctcatccagaatgtcagtagttctgaggttgagaaattctacctataagcaaatggacattgttgtgttccaataaaactttatttacaaaaaataatcagaaggccacatttggcctgtgagctatagtttgcttatctctattttaaatagctttttgctatatgataatatagttttctgtatttgttcctgaattgtctcattcaccccaaatatttttccaaattttcttctattttatgcctttaaacctttactaaatacaaataatacacagaaacaatagcccctgtgtaactaccacctaataattaagcatgttgttttattgttttgattaaaaatttataaaagaaataaatcatttcagaaaaaaaagtgtagtcttctctttttctctttccagtcctgctctttgccctgtgtctgcacagcaataacttagtgcactaatatctgtaaaaccagcacgtatccaatgtacaaggacatgatacatactattatgtgcttctaagtaacacaaatggtgatacatctttctgcaatttcattaacaatatgtgggatccaaaaccattgaaaaatactgatctaattcttttatctgctgtgttgccttcttatttatttatttattttttgagacggagtctcatctcactctgtcacctaggctgagtgcagtggcgccatcttggctcactgcaagctccacctcccgggtttacgccattctcctgcctcagcctcccgagtagctgggactacacgcgtccgccaccacgcccggctaatttttttgtatttttagtacagacggggtttcactgtgttagccacgatggtctcaatctcctgacctcgtgatccgcccaccttggcctcccaaagtgctgggattacaggcatgagacaccgcgcccggcctgtgttgcagttttatacaatttattcactgaagtccctttattagagaaaaacagttgtaaatttaaaaaactatatattttaagcactcaggatttaataaaggatttttgtaatttgaagaatgttcagtagagccaagaaagcttgtgggctttacaacctagaaaaaagttgtaagcagagaggcttagatccactacggtactgttcaaggaaaagtgtcagggctactactacccactgctcatcacctagtggttgagggcctggatgctgcaaacttccacagtgagcagttctaagcaaaccccaaaggccgaggaagctgaggggccaaaggaagaggctgaaaaatctagtttcttggaaacatttttttgtttggtttgggtttttttgttgttgttgtttgtttgtttgagatagtctcactctatcgcccaggctggagtgcagtggtgccatctcggttaagcaattctcctgctgaattcagcctctcgagtcgctgggattataggcgtgtgccacctggctatatttttgaatttttagtagagatgggttgtggggaaaagcaagagagatcagattgttactgtgtctgtgtagaaagaagtagacataggagactccattttgttctgtactaagaaaaattcttttgccttgagattctgttaatctatgaccttacccccaaccccgtgctctctgaaacgtgctgtgtcaaactcagggttaaatggattaagggctgtgcaggatgtgctttgttaaacaaatacttgaaggcagcatgctcgttaagagtcatcaccactccctaatctcaagtacccagagacacaacacactacagaaggccgcagggacctctgcctaggaaagccaggtattgtccaaggtttctccccatgtgatagtctgaaatatggcctcgtgggaagggaaagacctgaccgtcccccagcctgacacccgtaaagggtctgtgctgaggagaattagtataagaggaaggaatgcctcttgcagttgagacaagaggaaggcatctgtctcctgcctgtccctgggcaatggaatgtcttggtataaaaccggattgtacgttccatctactcagatagggaaaaaccgccttaaggctggaggtgggacatgcgggcagcagtactgctttgtaaagcattgagatgtttatgtgtatgcatatctaaaagcatagcacttgattctttaccttgtctatgatgcaaagacctttgttcacgtgtttgtctgctgaccctctccccactattgtcttgtgaccctgacacatccccctctcagagaaacacccaataatgatcaataaatactaagggaactcagaggctggcgggatcctccatatgctgaacgctggttccccgggtccccttatttctttctctatactttgtgtctttttcttttccaagtctctcgttccaccttacaagaaatacccacaggtgtggaggggcaacccaccccttcaatgggttttcaccatgttggccaggctggtctccaactcctgctctcaggtgatccgcccacctcggcctcccaaagtgctgggatgacaggtgtgagccaccacacccagcatctcagaaccatttaataaaaactaggaacagaagtcatgtcgcatgcagctgcaagatggtggatccctgcacaattaccccaaagttcctggctttatataccatagggaatttgcctaagggcgggactataataagtatggttcgtgagcaaacatcaaggttgtttgacctaagggggagaatttaaggtaagtacataaaagtacatttaaggtgttcctggaactggggctaatcaagagtcaacatggtagattagcatccaagatggagttgctttaacccccggcggagacccaagcctgcgccttgaagctccttctccaccggtagaagtcgactcaaggaggtcgtgaggacaggactcctgggggtcccgctctggggcacccgtagccctctcttccacagcgccctcctactggactcccgctgtagccaccgccgtgactgcagcaagtgcaccccctcccccaaccccgaggccgccgcgccgccaccgttgtttaaagaagcctctgcctgacttccgggagcagagcgctggacggacaagccaatgcgcatgcgcgaggcgccggctgtttccccgttcacaatgacccccacggttgcctaagaaaccagtccctgaggcttgggaaagcaggagccctccgcggcagtgcgtcggtgtcgaggctccgaggctccggcctcacctctccaggaggtcgacagaacgacaggacgttctccgaatgccaggagtcgcagagggcagagcaggatgaagaaaccacaggcggagtctaggggaagcagtacggcgtccctgcctcaggcctgcccggacggtgtgcgggtgagtctccccaaaagtcgtgcccctgtcaattcgaggacaggtctgcctgtgtgcctgtaggctactctctcacccgagggtcgttctcacagagagcagaaccccgcagcctcaggagttgcctggggcgggcggggggggatgtttgtgtaccactgctgtgtgtgtgtgtagtgtgtgtgtgtctcactttcttctctctctctctccctctgtttctttctctgtgtgtgtgtccgtgtgagtgtgttgtcacgaatgtgccctgtgcgccaaagggcaatttcttgcatgtcggcctgtctttggtgagcctctttctgcatctctgcctgggtcatgtggagatgcttcggacccagaggaattgaaatctcatccccagcctgagtggcagcttttctaggatcaagaccacacctcagccaaggacaaaagcatcagaagagctcattgtcctgagggaggggagcagaccgacgtcaaagatggttttaagtccgcgagactcttctctgacaaatgaagccacaccacgacacaggcttaaagaagaagccgggaacaggacatggcaaggatccctgtcactggaacactggcctttctggacaagtcacccgtttggcactcctccccgggtgcccgttgcggtggcactgtgctgtatcctgcctgggctctggcctctgctctgtcctccctcttgctgtgtctcccgtttctgaggggtgcagatgcttcttggtctgcctcaatgtcttcaacaaagaacactttccagtccatcagggagaaacttcaaggagatccatgtcatgattgtttccctctgcaaacttgtttctggtggattgggcacgtgtgaagatcctggagctctgggcatccatacctgtctcagacagggaagctcccttggtctccatgtttcacctgatggctgcgtagtttccctacaatgaatggtaggcgaccgtggctggccttggcttcaagagaggcggtgtcacatttcctctgcatttcctgtctcattcttaagggacatctgcttcctctgctcctgggtggactgcctcccagaactgaatcttttggcagccaataatgtcagggagccaaagggactgggctggggctgggtgcatgggaggttgcgttagggctacctaggcggtggagggatggaggtggagtgatctttacagaaacctctccgctcctccagcaggctccccaaaatgtggcttggacttacgcacagggcctcttctggttcccagctgtgctttgcttttccttggcattgttggggaggtcacctgtgccccccttccaccgggcacatgcctggacaccagtgttcgtctcgccatcgccccatatggcctcggtgacacacactcaccccatctgctctgggggacgccagtgccacgtttggtcacattggctccacctcggactcacccctgttcttgtttgcatgtctcctggaaagcggtggcggcacacagcagccccaggactttggcaagcggggcaggccactgcacctcccagggaggagggaggcagagggctcatgtttcagtgaattttcagctgacaccatgccttcaggcccatgggatctttctgtgccccagcgaggccctgcctgcctcaccagatgaggtgagcccatccctggtcacctggtgggatccaaaatcggatctgaagaggagtactgagaccccagcaggcgccctgaacctcctcttccactggtagaagttggctcaaggaggccctgaggacaggactcctgcgagtccggccctagggcgcccgcagcccccactccctcgccgccccctacttgatcccggattcagccaccaccgcgctgcagcaggagcccctactgccgccgccattgttcgagggggcctcagcctgagttccaggagcagagcacgagtcggcctaggcaatgcgcatgcccgaggcgcgagaggattatcccgtcacagtgattcccacagttgcctgagaaaccagtccctgaggcttggcaaagcaggagccctccgtggcagtgcttgggtgtccgggctccgagactccggcctgacctctccatggggtcgaaaggacggtctctggatgccaggagtcgcggagggcggaccagcatgaggaaaccattggcggaaaatggcagaagcagtgcggcatcccagcctcaactgccgggacggtgttcaagtgagtctccccaaaagtcatgccccccgtgatctcgacgacatgtctgcttgtgtgcccgtgggctgctctctcacttgagaatcgttctcgcaaagagcagaaccccgcagcctcaggggttgcctggggctatgtgtttctgtgccactgctctatgtctgtgtgtgtgtgtctcccattctctcttctctctctgtcactctgtttctctctctctgtctgtgagtgtgtgtgccggtgtgcgtgtgtgtgttgaatgaatgtgccctgtgcatcaaaaagcgatttcttgcatatcggcctgtctttggtgcgcctcttgctgcgtctctgcctgggacatgttgccggttgtcaatcggtttcgcggcagttccactttgggtttctaaaggcctcgacgacgtgaggagaggcgtcggtcctggaggaactgaaatttcatctccatcctgagcggcctcttttctaggatcaagacgaccacactccagccaaggacaaaagcctcacaggagctcactgtcctgcaggaggggagcagacaaacgtcaaagaagatggttctatctcctcacggctcttctctgaaaaatgaagccacaccacgacacaatcttcaagaagctgggaatgggacatggcaaaaacccctggcctctctggacaagtcacctgtttggcactcctcccctcagcctgtggcggtggcactgtgctgtatcctgcctgggctctcgcctctgctctatcctccctcttgctctgtctgccctgtttctgaggggcctagatgcttcttgttctggttcaatgtcttcaacaaagatcacttcccagtccaacagggagaaagtggtgatccgtgtcatgattgtttctctctccaaacccgtttctggtggattgggcaggtttgatgatcctggagctctgggcatccatacctgtctcagacagggaagctcccttggtctccatgtttcatgggatggctgcgtggctggccttggcttctaggaaaggcggtgtcgcgtttcctcttcacttcatgtttcattcttgagggacatcctcttctgagctcctgggtggactgcctcccagaactgaatcttttggctgccatgaatgtcagggagccaaagggattgggctggggctgggtgcatgggaggttgtgtcggggctacctaggcattggagaggtgggggtgaagtgaactttgcagaaacctctccgctcctccagcaggtgtagcaaaatgtggcttggattcacgcacaggccctctcctggttcccaggtgtgctttgcttttccttgacgttgttggggaggtcacctgtgccccccttccaccaggcacatacctggacaccattgttcgtctcgccatcgccccatatggccttggtgacacacactcaccccatctgttctgggggacgccagtgccacgtgtggtcgcattggctccaccttggactcgcccctgttcctgtttgcacgtgtactagaaagcggtgtcttcttgcaggagccccagggctttggaagcggaacaggccactgctcctcccaggggcgagggaggcagagggctcatgtgtcagtgaattttcagccgacaccacgccttgaggctcatggatctttctgtgccccagcgaggccctgcccgcctcacagatgaggtgagctcatccctgcttacttggtgagatccaaaatctgaagaggagtcctgagaccctagcaggcgccctgaagctcctcctccaccggtagaagtcggcacaaggaggtcttgaggacaggactcctggtggtccagccctggggcgcccgcagtcgcctctctcaacgaagcccgctcctcgaccttggatccaggtgccctcctaccgccgcgccgccgccattatttaaaggggccgcagcctgacttccaggagcggagcgcgagtcggcctagctaatgcgcatgcgtgaggcgcgaacagattctcgtcacagtgattcccatggttgcctaagaaaccagtccctgaggcttggcaaagcaggagccctacattgcagtgcttgggtgtcggggccctgaggctccggcctgacctctccagggtgtcaacaggatggtctgcggatgccaagagtggtggaggtccgaccaggatgatgaagccacaggcggagtctgggggaagcagctcggcatcccagcttcaggcctgccgggacggcgttcgagtgagtctcccagaaagtcgtgcacccccgtgacctcgaggacaggtctgcctgtgtgcccgtgggctgctctctcacccgagagtcgttcttctggagagcagagccccgcagcctcaggggttgcctgggggggtgtgcttctgtgccactgctatatgtctctgtgtgtgtgtgtgtgtgtgtgtgtgtgtgtgtgtgtgtgtgtgtgtctcccattctctcttccatctctgtctctgtttctgtctctttcttactttctttgtctgtgcgcccgtttgcgtgtgtgtgtgttgggacgaaaatgtcttgtgcaccggagtgctgtttctttcttgtaagcctgtctttgttgagcctctttttgcgtcttttactgggtcttgcggcccattgtcagttttccctgccgttccactttgcattttgtgaaagcctcggcaacatggggagcatcgtgggtcccgcaggagttgaattctcctccccatcctgataggcctcttgtccaagatcaagacgaccaccccacacttaagcacattttttaaaggggtcgcagcctgatgtttaggagccgggcccatgtagacctggctaatgcaccttactcgcctctcactgcctgtcacttcgtccacagcagcccccgctcactattttttaaaggggccactgacgggattacaggagccaggcgcctgtcggccttgccaatgtgcatgctcgtggcgtgtgcaggttctcacgtcttaatgatcccctccatcgtctggggaatgggtccctgaggcttgccgatcacaatcactccgtggcagtgcatccgtgtcaaagcttttgcctgacctctcaacgtggttgacatgattgtctctggatgcccggatttgaggaggtcaccgaccaggatgaaaaaacctcatgcagagtcacggagaagcagcgcgggatcccagcttcaggggacagatggaatctccggactcccatttggatctgattttggatcccacccattgagcaggaatggggttacaatctggtgaggcggggagggcctctctggggcacagaacggtcccacggacctcaagccatggtgtcagcttaaagttcattgactcatcagcccactgcctcccttctccttggacggagcaatggccttctctggtttccaaaatccagggactcctgtatcctgacactgctttctgggaccagtgccaacagggccaggggtgagtttgaggtggagcaaatgcgaccacacgtggcactggcgtcccctatgagcagatgtagtgagcgtgtatctccaaggtcgtttggggtgatgtggagactgacagtgatgtcctggcatgcgctcagggggctatggggaccttcggaagaaagccaaggaaaagcaaatcacacctgggaaccaggagagggcctgtgccggagaacaagcccattcagggaggcctactggaggaggcgagaggtttctgcaaagtacccttcacccccacccctccattgagtaggtacttctcaagctgtctttccttcacccagccaaaacggaaaatcgttcctgcctttttaggacagcagtgctgagcagcaggattccctgagctttgagaccaggacggtgccctgggaggcccaggtcgaagggaggcagtgagctcatgaaacagggaattttcagctgactccctcccctgggatctcagctgttactgtgccccagcgacccccttcacacctcaccagactgaataaccagccccatgggacccgatttctgcccataccttccaatccggaatcggagcagaagagcagtcccgagtgcccacctcacggtctgaagcgcctcctcctccaccgggatccgaacacgaagtcggcttaaggaggccctgaggtcaggactcttagggtcctgcgctgcttgtcgcaagcagcctcctcccccaagccgccgccggtccatctctagcattttcctggggctgccgcctgacagccctgacattgcagcgcgcgcgagccgaccacgacaatgcgcatgcaccaaacgcgaggcaccagggcaagctctgagccagggctggcctcccagggaccaccaccattgcctgggcacgggtcccagaggcttggcagatcaggagccctctgtggcagtgtgtagagttgggctgatgtctctcctctctgagggatcagcacggtgatcccacaatccttggagactggcagggccgaactaggctgaagaaacgtcaagcagggccccaagaatgcaccacaggatccctaaggatccctatgatgtatcaggcctgcctagatagtttaggggtgaatctccttgaaagtcgtccccccgggatttggacatacggcctgcctatgtgcccgagggctgctctctccccggaggggcttcctggcagagagcagaaccacgcagcctcaggagctgcctggctgtgtgtttctgtgcgagtgctggatgtctctgtgtgtgtttctttctgtgtgtgtgtggtttcttgtgaaacaaatgtgactcgtgcgctggagcgcggtttctctcaagtccacctaccttctgatgctcctcactctgtggctccgcttgggctgcggggccccacgtcctttgttttgcttgtagttcctgaagcctcggagaagtggggggctggctccaacccacaggggtccaaatcatctccccaccccggggagccactcttctagaaagaagatgagcacaacacacccaagaacagacgcctcctaggggcccatagtcctgtggcacatccagggctggaccctagctgtcctgtcctcaggatccccttgagcccacttcaaattccgttgctggcagggcaggagcttaaggatgtcagatgggcactcaatcttctttcagttccattccgggtcaaaaagaaatgatgtgtgtagaaataaggtgagacaggggtgaggatacagtctgatgaggtggggaggaggtcccacaactacaccagcaggacaggtgcagatagatgtcaaagaagctggttccaactcattctccccttcctcttcactgcataacctgtccacaccatggcctggtgctggtggaagaagacatgaatgtgaggagaatatttggactgcaaactgtggcctttctggccagcttccaggttgggccctcattcccggagccacatgcgagtgggatggattgatcctgcgcgggctctggcctcttctctgtcctctcttttcctgccttccatgtttctcatgggcctagggtttccttggtctggctctacattctctacaacaaacttttcccagttagttgaggatgacctttctgaagatccatgtcatgagtgtttcctcctcaacacccacatttcctaatgactgggtagctgtgataattcttgaaccgtgggtgctcgtagctcccaccaacagggaaacttttggtcctcctattccgtcagatgactgcatgattcccataggatgagaggtagtcagccatggctggcctttgccttctaatctaggctgtgtttcatttcctctgcacatcctttcttattgttgagtgatctcccatttctctattcctgactggaactgcctctcagcacggaaccattggctgttaggaatttcacagagcaaaagggactggcagttgactgggtgcaggccaggtggtgagtagtgatccggtgtggggtttggggtgttttgcactttgcacctcttggctcctctggctggaatccctgaacggggcttggactctagcacaggcccctcctgtggtcccagttgtgctttgcttgtccttccctttcttggggatcctcattgcccattgggagcatgcccggacatccttctgaggcttggattcaccccatatggcctttgagacacactctcaaccttatctgtccccatggattgccagttccaggtgtggccaccttggctccactttcagcttgcctttgtcctcgttcccgttgctactggacagcagtgctgaggagaagcaggagcttctggcagccagacaggcatgtttgctgaggcactagtttgcatgacgctactgggacccctcggaggatgattttggtagtagggccaaggccaaacaggttagtagccaggctctatgggacttgggttgtttccaagtctgaagcaagatgactgctgggtctacaacctagatatgggtcactgctttcaaaacaaccctcttaggtcttgggatccacaagggtttcataacctcctacatgaatcccaaggctcccagagagagacttttgccaatggataagtgcagaattcttactattgtggggggatatgagcaggtgaccacatatttcaccatcttgctaacatcatcaccatctgtttcctttattgtataataaactagtaaacctaagtgttttccacagatctgtagccattctagcaaatgatgcaactaatggagaggatcatgggaacttctgattcagtcattcagtaagacgtacaggtgacatctggacttgtgattggtgtctgaagtgagagtagtcttgtgggactgagcccctggcctgtgggatctgactctaaatctgattagtgtcagaattgaagtgcaggatgcccaattggtgtgcacaaggaaaagccccacacaagtggtatgagaagtactgagagtggcatgagtatagaaggaaaacctgcttttgcagatacagtggcatacatacaatccttttgtataaccagggttatacaccatgaccaagtagaatttattcttggaatgaaacaatggttaaatatttgaaatcctaacgtgtaatatatcacattaagagtgaaggaaaaaccccacttgattatctcaattcacgcaaaaagtttcaaccaatttcaaaaaccattcatgattttttaaaaagtcatgcaacaaattaggaattgaaggaaactacgtcaacataataaaagttttatgtgaaaaacccacagtggacagcacactcggtgaaagactgaaagctttttctccaagatcaggaacaaaggaagaaggcctgctgtcaccatgttcattcagcagagtactaaaagtactagctacagaaatgtggcaaaaaaaacaacaaccggcatccaaattgaagacaatgaaatgaattttctgtgtttgcagatgatatgatctaatgtgtaaaaaacccaaaagactccataaacaaaaaacaactaataaaatgaattcagcagagtgccaggatggtcaacacacagacaaaaaaaagtttcatttctatacaattacactgaagaacacaaaaaaaagagaaaaccatgccattcacaatagcatcaaaaagaataaacttcttcaaagttaaccaacaaattgaaagacttgtccaatgaaaactacatatcattcctgaaaaaaaattaaagacataaactgaaaggcatccccatgttcatggattgggaaatttaatattgttaatatgtcaatactatctaaagccatctacagatttcatgtaatccttctgaaattctaatgacattttttgtataaacggaaaaatctatcctgaaattcatatgaaacctcgtgggattccaagtaggcaaaacaaccctaaaaactaggaataaagctggaaaaatcacactttctgatttcagaacttactgcaaaatgagagtaatcaaagagtccaatattaatcaatgcatatatagccagatgcttatcaacaagggtgccaagatcagtcaatggggatatgacagggttctgaactgtgctaggaaaactgggtatctacataaaaaagaataaagttgaactatttttattttttgtttgtttgtttttttgagacagaatctgtgtcgcccaggctagagtgcagtggcatgatcttagctcactgcaacttctgcctcctgggtttaagtaattctcctgcctcagcctcctgagtagctgggattataggtgtgcaccaccatgcccagtgaatttttttatatttttagtagaggcggggtttcaccatgttggccaggctggtctcgaactcctggcctcaagtgacccacccacctcagcctcccaaaatgctgggattacaggcacaagtcactgtgcccagccaaagttgaactcttaatgccatatacaaaattagcttaaaatggatccataaactaattgtgagatcaaatgctttcatagcactgcatttggtaattttttttggaggataccaaatgtacaggcatcaaaagaaaaaacagacaagttgaaattcatgaaaagtaaaaaagaagtgtgaatcaaaagacatcagtagatttaaagggaaacccacagaatgaaagaaaatatttacaatcataaacctgataagggattaagatgctaaatatataatctgtaaaatccaacaattaaaagggtccaaaaatctgccacagacttcagagacttcacgtctctactaaaaatacaaaaattatttctccaaagacatacagatggccaataagcatgtaaaaagatactcaccacactaattattagggaaatgctaatcaaatctataaggagatactactttatctccattagaaaggctgccgttaaaaaacagaaaataagagctgttggtaatgatatagagaaatgggaaccctgaggcactattgcagggaatagaaaaaggtacagccactgtgaaaaacagcatggcaattccttaaaaaattgaaaatggaggccaggcgtggtggctcaagcctgtaatcccaacacttggggaggctgagatgggcggatcacttgaagtcaggagttcaagaccagcctggccaacatggtgaaaccccatctctactaacaatacaaaaattagccaggcgcagtggcatgtgcctgtaatcccagagggctgagacaggaaaatcacttgaacccagaaggcagagtttgcagtgagccaagatttgaccactgcactcccaattgggggacagagaaagactcatctgtcacaaaaaaaaaaaaattaaaaatagaattaccatatgatccagcaattccacatctaggtagacactctgggaaactgaaagcagtttcaaagagatatttgtacacccacgtgacagagcaggagcatcgccatcttggacaaacaccgccattttaaattccccttggccgagcgtggtggctcacgcctgtaatctcagcactttgggaggctgaggagggcggatcataaggtcaggagatcgagaacatcctggctaacccggtgaaaccccgtctctactaaaaatacaaaaaatgagccgggcacagtggcgggcgcctgtagtcccagctactcgggaggctgaggcagaagaatcgtttgaacccgggaggcggagcttgcagtgagcccagatggcgccactgcactccagcctgggcgacagagtgagactccgtctcaaaaaaaaaaaaaaaaaaaaaagtttcccttgattaaaaactgcctaaatccagcccaaaaacacaacataatggctaatgtcagcatgaccataaaggacaaatgacacttctgaccagaaacattccaaccccgagataaacctccctctgaacagaaacattgcagccccacaacaaaactctcctctacccaaaaatattccaaacttgcaataagctctcactccctaaacccttaaatatccttattctgtaagagagaacatgcctggcctaaatcggccagaagcccctctcaggtttattttcccaaataaacctgtctttgacggtcaagctgcttttcgtgtttgtttcttctttctttaatccttacaccatgttcatagcagcattatgcacaatagctaaagtagaggcaccccaagtgtcccttagtcaatagatacataagtaaaatgcagtaaatacacacagtgcacattattcagcctttaaatagaaggaaattctgacatatgctgcaacatggatgttaagaatattatactaaggaaataagcctgttataaaataaacactgtattattccacttatatgaggtacttacaacagtcaacattatagaaacagatagtagaatggtggttggcaggggttgggggaatggggagtcattgtttaataggtatagagtttcagttttgcaaaatgaagagttctggaaataaatggtggtggtgtttgttcaacaatatgaatgtccttaataactctgaacagaagtgtatgctttaaatggttatgacaccaaattttatgtgtatttcacaatttttaaaaattaggaggaaaataacccagccaaaatcatgagcaaaagacgtgtaaaccaggagttgagaaactctttctgaaaaggtcaagagtgctttcctgttccacagagtctctgtactgactattcaactctattataataggaagaaagcagccatagacaaaaagtagacaatgagtgtgctaatcttgcaatgaaacattttttattttttattttttttgaaacgaagtttcactcttgttgcccaggctggagtgcaatggtgctatctctgctcaccgcaacttctgcctcctgggctcaagtgattcttctgcctcagccttccaaatagctaggattacaggcatatgccaccacacccagctaattttgtatttttagtagagatggggtgtctccatgttggtcaggctggtctctaactcttgatctcaggtgatccgcctgcctcagcatcccaaagtgctttgattataggcatgaaccaccacactgggccgaaatatttaaaaagttgcatttggttactggtcagagtttcccaatcaaatgcataagctggttaccactttgaaaatgagtagttgtaggccaggagcagtggctcacacctgtaatctcagcactttgggaggccaaggcatggggatcacgaggtcaggagttggagacaagcctgaccaacatggtgaaaccccatctctactaaaaatacaaaaattagcatggcatggtggcgtacacctgtagtcccagctactcgggaggctgaggcaggagaatcgcttgaacccaggaggtgaaggttgtggtgagccgagatcgtgccactaaactccagcctgagcaacagagcgacagtctgtctcaaaaaaaaaaaaaaaaaaaaaaaaaaagaaaagaaaaaatgaatagttgtacattactgagaaaattgaaaaaatctgaatttggattcaattttggaataggaaattattactaattttcttatgtgtgattatatgacactttgagtaaacaggaaattgtttttggggagatggactcatgtatttagatgtagaaaattatatcatccataacactgtcaaattatatatcaaatgtataggggcaaaaaaatctaatgtggcaatatattaatatatattttatttgctgcaattttaaaaacttttctatatatttaaacttaaatatataattaaatgtataataaaagtgtaaaaattgcaaactagataatatttggttaatttctaatgcattttgaattgtgcaaaaggaatataaattattattttcacacttttgacattttaaaaatttgtacatctgaatttcattccaggattaagtgtgtgattcaccttgacattcgaatgagaccctctcatggtttttacttgcttgagtttatccagaatgaattcaaattcaaaaagggatgagtaattacatgaaatgcttctgaattctgtcattcttctgaattttatctcatcaaaatccactaacaattccacagaaatgaaaaaaattaacaaaaaatagcacccataatgatatcacaaatggaagctaatatttattgaacataacagtacattctagatagtgttccatgtttttttcatgtattaactcatgtaatacagcaatatactgtaggtactactatcgccatttacatatgatgcccagaggggataagtattatccccaatatcatattggctgtaaggagttgaacgctgatgacgatcattaagatatgtagcatgggggcaggcgcggtggctcacgcctgtaatcccagcactttgggaggccgaagcaagcggatcacaaggtcaggcgttcgagacaagcctgaccaacatggcgaaacccaatctctactaaaaaaatacaaaaattagccaggcatggtggtgcacacctgtaatctcagctacctaggagactaaggcaggagaatcacttaaacccaggaggcagaggttgcagtgagccgagattgcaccacagcactccagcctgggtgacagagcgagactccgtctcaaagaaaaagaaaaaaaaaagatctgtagaatgtctaaagccttttccacatcacacagctctgtttgatgacttttcatcaatttaacagtaattggtgctggaagacttttacatacaaagtataaagagcaatgcaatgctttcctatatcctctcaattttcctctattacgaatggttcgataatgcaaaaatagaagaatgccagaaaaggttttcttttctttctttttttttctttttgagatggagtcttgctctgtcgcccgtgctggagtgcagtggcgcaatcttggctcactgcagcctctgcctcctgggttccagggattctcttgcctcagcctcctgggtagctgggattacaggtgcacgtcaccatgcccagctaatatttgtatttttagtagggacagggttttgccgtgttggccaggctggtctccaactactgacctcaggtgatccacccctcttggcctcccaaagtgctgggattacaggcgtgagccactgtgcccagcccaaaagaggttttcttgtgttgttataaaaatacattataaactatctgaatctgagtaacatttgggttcagagctaaaaaatgacacattactgacattttgaaaagttcacaccggtacaaacaaattgatacctaataagagcttaaccatatctaaaagccttcccgtgtagtctttatccaaattgtttctcagtggtataaatacattgacacactgtacatatatacatatacatatatatgggtccctcctcttggccaagggcattccagagttacctgaaaatctagatcaggccatgatggaagaggggttttcatatgcctcatgatacccctccagcatgaacatcaacacagaccttaagtctgataagaaacatttgtatcctctctcaagcctgctacttggaggcttcatctgcagaataaaacctaggtctccacaaccccttttataacccagacataacctactgataactctttccaccgaatgcccatcggaaaattttaaaatctacctatgacctggaggcacctccttctagttgtcccacccttccagattgaactagtgtaactctggcatgtattgattgatctcatgcctctctaaaatgtgtaaagcaagctgtacccgagccactttggttgggcacatgttgtcaggacctcctgaggctgggtcacagggcatccttaaccttggcaaaatcaactttctaaattgactgagacccatctcagacattttgggttcacaaagggatttttttgtttgtttgtttttttgagacagagtctcattctgttacccaggctggggtgcagtggtgcaatctcagctcactgcaaccgccacctcccaggttcaagagattctcctgcctcagcctctcgagtagctgggattaaaggtgccgtcaccacacctggctaattttttgtatttttagtagagacggggtttcactatgttggctaggctggtctcgaactcctgacctcaggtgatccacccaccttggcctcccaaagtgctggaatgacaggcgtgagccaccacgcctggccttaatttttttaaatagagatggggtctcactatgttgcccaggctgttctcgaactcctgagttcaagctatcctctgcctttggccttgcaaagtgctgggatgacaggcatgagccaccacaccctgccgtaaagggcttcttaccactatgagtactctgatattgagcaaattgcccaaacacactaaaggccttcccacacttctcacattcatagggcttctctccagtatgaatactctgatgtgctttaaggcctgagttgagcctaaaggacatctcacatttgttacattaaaagggtttctcaccagtgtgaatattgatgttgactaagtcatccatacacactaaaggccttgtcacattccaaacatttatagggtttctcaccagaatgaaatctatgatgtacagaaagttggcggctagtcctaaaagcttccccacactctttacattcataggttttctcagcatcatctcttgttcattgaacatgtatatgaggctgaagggtgttttccttgttttctgtaacatctgaggagtaaggaaaggggtattttcttcttacctgtctgaaaatcttgtttttttaaagttaactgttgttgttttttttaagtaagattgatgttttctcaaaggtgagccttgaaatttgtaaaattggaattataagaaagagaaacctacaaagcacagacattaagacaaccaggtagcaacagaattaagttccttttataatagcagactaatggacaggtggtcttttttatcttctgtgatgatacattattacactacctatcatgtacttgtttctatggattatcttgattcatcttcagacctgtcatgtgtagtgagatggggaaacagaggcaccaagatgttgacatctcacaatgcagagctcagtatcactttcttagaggctgagaagacagcctgtctccttaattttaccaggataccacttaatttatgcatagatttttaaacctgtcttttttttttttttttttttttaagagacaaggtctcgctctgttgcctaggttggagtacagtggtgtgaacactgctcactgcagcctcgacctcctgggctcagcaatcctcctgcctcagccttccaaagtgttgggattacaaatctgaaccaccacacctggcctaagcctgtcttctttactgagtaattcatccttgatactatttacccatcgattatataatttaacatcaatcttattaataatggcataaggccgggtgtagtggctcatgcctgtaatccagcactttgggaggcagaggcgggcggatgacctgaggtcgggagttcaagagcagcctgatcaacatggagaaaccccatctctactaaaatacaaaattagctggcgggggtggggttggggggtgacacatcccaggctggagtgcagtggcaccatctcagctcactgcaacctccgcctcctgggctcaagtgattctcctgcctcagcctcccgagtagctgggactacaggcatgtgccaccatgcccggctcttttttttttttttgagagggagtttcactcttgttgcccaggctggagtgcaatggggtgatctgggctcactgcacctccgcctcctgggttcaagcgattctcctgccttaacttcccaagtagctgggattacaggcatgtgccaccacaccctgctagttttgtattttcagtagagatggggtttctccatgttggtcaggctggtctcaaactcccgacttcaggtgatctgcccacctcggcctcccaaagtgctgggattacagttgtgagccaccgggcctggtagcccagctgatttttgtatgtttagtaggtatggggttttgccatgttggccaggctggtctcgaactcctgacttcaagtgatcctcctgcctcagcctcccaaagtgctgggattacaggcgtgagccaccacgcctggctaaaaaaaccaaaaactttagataagtgaatttggaggaaatatttataacagataaaatggacaaacagataataattctaatttactgtctctctggcttaataaaatattagtcaataccctaagaagaaaggaacaaaataaaaattagccgttcacaaatacaaatagtcaacaaagaaagccaaaacctacgatctctgaaattggctcttgaatttattgaacatgcaatgacttcagattaggaaatttcaaaaatgttttttaaagtttcactttttggaatttaaaattaatccaaattatttaatattcaacatttggaatttaccaatcaatcctctttcattttatttttcacccttagaataattcctttttcaagagtttaaaacatttttaaaattaattgattctgcaggctgggcagtgagctgtgattgcaccactgcactccagcctgagtgacagaacgagaccctttctccaaaagataaataaataattgacttaatttttagaacagttgtaggtgtacagaaaaacagagcagaaggcaaattgagctctaatatccccctcacaccatagtacacacacttcctctattatcatcttgttagtgtggtatatttgtatgcttgatgagccaatattaatattattaagttcatggcttatattaagattcactctttgtgttctaccatttatggactttgacaaatgcatgaggacatatatccaccattaaagggtcacagagaaaagtttcattgccctaaaaatcctctgtgctccacctattcatccttccctctgctcaagcctctggcaaccactgaactttttataataccatctgcctagttttgcctttttctagtattttatataattggaactatacactatgtggccttttcacattggcttctttcacttagaaatacatgtttaagattcctccatgtctttccatgccttggtggttcatttctttttattcctgaagaatattccattgtatgattgtttcagagttagtttatgcatttccctattgtaggatatcttggttacttccaatctttgttggttatgtataagctgctgtaatcattcatgtgcaggatttgagtggatctaagttttcaacttatttgggtatgtaacaaagaatgcaattgccagatcatagggtaatcatatgtttagttttgcaggaatttgcaaaactgccttccacagtgactgtaccattttgcattcccagcagcaatcaatgagagttcctgttgcgccgtatcctcaccagcatttggtggtgtcagcgtttggatttgagccagtctaacagatgtgtagtggtatctcatctttgttttaatttgaattccctagtgacatatggtgttgagcatcttttcagatgtttatttttgctacctatatagcaaagggcagatacagatgatggactgcggggaaagagcttgctgtgatgataggaagctgcagtcagggatgatctcagggttacctgggcatcaactgtgctttctcctgtcacataaaatgtggtctacctgagttttgattggaaacagaataatacctggttgtccataaatatttctgactgaggcttgagatttatgtatgttttgactgaaaggtcatataagcccaatatataaacaggttggggtacaacagggaatgactgtcagagatgttgagagtctacactgaatggatgatgtcactgcctgcccatgtctttctcattatggactttcagtgtttatttgccacttgaaaggccactgagataggctacatctgatttttctcttgaggatctctattactgagaaatttctgtattctgggccacactgggttcataatctgactatatatatcatgtgtgtgtttgttccttccctaaaatgctcagttcagctgcagttctagaggtagatactactatgtttgtatttcagagagctgaagatctgaggtctggagaggttagtgtgtagaaagttatgttgaataagtggcaaggctatgtggccaggtcagataagctgccttcggattttgctcttgaacttctactggataatatcttttcataatagaaaagaggagagtgaacttaggtgttttgttcaaatcatcgactgtaggagttctttcaagatatgatgaaaagcaataattgtctcattttacattacctataattattgctcaccagaaattgattatcgatgcagcaaccttttacattcctctctgctttattatgcatggccgggcttcactgtaactaagagggtccaagattcagaaatatctttaacttgcaatgcttggtcacaggtatccaactgaaaaatattttgctcattagccatatggacacatatggtaaactacagccagagacacaaaataagaagaaagggcgatcagaagtcctgtgtctccttaaattttgtatttctattcaaatgcatctagagtcatgaggaagttgaggaaatgggaaatgcaaagtcctaatcaaagcattcccgcatttcagttatctgcattattgcacatttacatttataatgcatacataaaattcaattcaataggtataaaaatgttaagtaaccttttctctcatgcactccagtcattcagtagctcacttgagagtcaatattttaattttgttttgaatcctttaattttttttctttttctttttcttttttttcttttactttttttttttgaatcaaagtctcggcctgtcacccaggctggagtgcaatggcacgatctcagctctctgcagcctcagcctcccagattcaagtagctgggattacaggcatgtgccaccacacctggctaattttttgtatctttagtagagacggggtttcatcatgttggccaggcctgatgtcgtgatccacccgccttggcctcccaaagtgctgggattaccggcatgagccacgcgcctggccaatttttttctttttttaaatgaagttttattgtgtatatttaaggtacacaatataatgttataggatatatatatacatagtcaaagagttactatagtgaagccaattaaaatatctatcatctcacaggtacccacattttttggtgtggcaagggaagctaaaatctactcatttagcatgaatcccatatacagtacaattttattacctatactcctcatgttgtataaaagatgtataggattgttcatcctacgtatctgctactttgtatctctgacccacgtgtcctcatttcctcccttcctttctcactggtaatcactgtggttctctgtttttgttgttgttgttgttgttgttgtttgagagggagtctcgctctgtcgcccaggctggaatgcagtggcgtgatctctgctcactgcaacctccgcctcccgggttcaagcaattctcctacctcagcctcccgagtagctgtgattacaggcgtgtgccaacacaccaggctaattttttgtatttttagcagagacggggtttcaccgtgttagccaggctggtcttgagcttctgacctcctgatcctcccaccttggtctcccaaaatgctaggattacaggcgtgacccactgcatccggccttctatttctttatatgtgaaaattattttcagattccacatgtaagtaaggtcatgcaatatttttctttctgttgttggctaacttcacttggtataatgccctccaggctcatccatgttgtggcaaatggaaagatcttgttcttttttagggctgaacacagaagttattttcatatacaagtatgcaggtgccatacacacacaaatatgtatgtatatatcatactcacatacaatttcaaatacatctatgtgttacatgcatatataagtatttctgtattttcacagaaatgtcactctaaatcagtacctagggagggtcatcgttttcttgagctacaaagcaagacacagtatgagtggctgcaccctagtttaataagtcctctaagtcatattgaggatttttcctgttttctttcgttgttgttgttttattttgctgtgttttgagactgagtttcactcttttgagtgaagtggcatgatcttggctcactgtagcctcccaagtagctgggattataggtgcccccccaccacgcccggctaatttttgtatttttagtagaaacggggttttgccatgttggccaggctggtctcaactcctgacctcaggtgatccacccaccttggcctcccaaagtgctgagattacaggcgtgagccaccatgcttggctgctttcaccatttcagactgagcttagagaagaacctgaggaaaaacatgacttcataatttgatgaatggagaaatctctttccattcaccctcctttgctctatttcattcttattgtgaaatttgcaaacaaagatgtggatacattggttattaaataaacatctgtgtgatacctatccaggtgaagaaatagagcacaaccaacaccaagaagtcctctgtatgcccctaactgatcctaaagtcttccttccccttattagtaacagatatacagatatccacattacctgtggatatctgccatcctctccttgcttctctttgtaattttattatgcattttcttttctttatttttttggacacggagtctcgctctgtcgcccaggctggagtgtagtggcatgatctcggctcacggcaacctccgcctcctgggttcaagtgattctcttgcctcagcctcccgagtagctgggattacaggtacaggccacgtgccaccacacctggataatttttgtatttttagtagagacagggttttgcatgttggccaggctagtctcaaactcctgaccccaaaacctggctttattatgtattttttatgtgcctaaagtctgattttgcccggtttttctcttacataattggagtaatagtttgtatcctactgcatctggcttcttttactcaatattaagtatttaagattcacacttagctttgtttctgcattctattaaaacggtacaccagccaggcgtggtggcttacacctatgatcccagcactttggaaggccgaggcaggcagatcacttgaggtcagcctcaggagttccagaccagccgggccaacatggtgaaaccccatctctactaaaaatacaaaaattagaccgtgcggtggctaacgcctgtaatcccaatgctttgggaggccaaggcaggcagatcacggggtcagaagattgagaccatcctggcaaacatggtgaaaccctatctttactaaaaatacaattagcctggcgtggtggcatgtgcctgtagtcccagctactgggaggctgaggcaggaaaaccacttgaaggcagaggttgcagtgagccgagattgcgccactgcactccaacctggtgacagagcaagactctgttaaaaaaaaaaaacccaaaaaactaaaattagccaggcgtggttgtgcgcacctgtaatcccaggtacttcggaggctgaggcatgagaatcacttgaacctgggaggtggaggttgcagtgagccaagatcgcgctctgcactccagcctgcgcagcagagtgagactcggtctttaagaaaaaaaaaaaaaaaaggctgggtgccgtggctaacgccagtaatcccacagtttgggaggccaaggctggtggatcaccagaggtcaggagttcgagacaagccttaccaacaaggttaaaccccgtctctactaaaaatacaacaatttgccaggagtggtggcacgtgcctgtaatcccagctacttgggaggctgaggcaggagaattgcttgaacccaggaggcagagtttgcagtgagtggagatagcaccactgcttgcccagatcaagagttaccaataccaagacataaaactgcacagagattggacctagagcagcaggaggtggtatataaatcacagatactagaggaaattgaaagagggagcagaaaaatgattcatctgtatcaggtgtggtcggcaagttgtaggatgtagaatgtagctggtggatataggaagagaattagaaaaaattaatgctcattcaagtttattttatgaactagccaaaatgtcacatatggatattcacagtaggtagaaagatcagagcagaagtagcacttttggcacatagttattgggattgagggagacttcattttagctgtaattttaaaatagatttggttacttttaattaatctttctaaagcttttaattttgaaaaagctttaatttttattgtggcaaaatatacatagcataacatttgccattttaaccattttaagtgcatagttcagtgtcactaaatacaatcacacgattgtacaaccgtcacactttccatcatctctagagctttttccttttcagtttcccaaactgaaactctgtaccctttaaacaatagcccttcattactctctcctcccagtacctgggaaccatcattctacttttggtttctatgaatatgacatgctcgatacctcatataagtggaatcatgcagtattagttttttgtatccagcttctttcacttagtcttatgtcaaggttcatccatgttgtagcatgcatcagaatgtccctttttaaggctaaataatattccactgtatgtctgtaccacattttgtttatccattcctctgtcaatgaatgcttccaccttttggctatcatgaatgatgttgctatacacatgaatttgcaaatatctgttgaagtccctgctttcaattcttatgggtttaaacccagaagtggacttgctgactcatacagtaattctatgttccatttttatttatttatttatttttgagacagagtctcactctatcgcccaggctggagttcagtggcatgatctcagctcactgacacctccgcctcccaggttcaagcgattctgctgcctcagcctcctgagtagctgggattacaggcacacagcaccacgcctggctaatttttgtatttttggtagagacggtgtttcaccatgttgttcaggctgatcttgaactcctgacctcgtgatctgcctgcctcagcatgctaaagtgctgggattgcaggcatgagccatgcgcccagcctatgttccattttttttttttttaatttaggaaccactgcactcttttccaccatgactataccgttgcagaatccactggaaaggcacaagggttctgatttggctacatcctcaccaacacttattttttcctgtttttttgatgattgacatcctaatgggtatgaagtggtatcttattgtggttttgatttgcatttccttagtaatcagtgatgttgagcatctttcatgtgcttgatggccagttgtatatcttctttgggaaaatgtctatgtaagtcctttgcctattttttagttaggttgtttattgttgagttgtaggaattctttatatattctggatatcgatcacttatcaaatatattatttgaaatattttcgtccattctgcaggttgtcctttgattgcacaaaagttttaaattttgatgaagtccaatttgcttatttttttcttttgttgcccacacttttggtgtcagacagcttttagtttacagttataaatatatcatgtctctcctgcctcatatgtaccactggacaaggtcccttttatgtgctcagattctgttagaggtaaatgtattttgaagtggagaacaaagataattgcaaaattggcatggagaactaaagtaattatgaaagttccagatacaaagagagtgggctcaatatgccagcagttctctaccaatccatcctagaagctttcttttaggattgcctaaataatgcaggggatgggtgcaagacacacaagtgttctagaagcatgtaaacaaggtacagagaagaggataagataaaataagatgagataagaatattaggaaagccttgttcagaagattgcctacagaggcaaaagggacagtttcactttgctgagggaaatagggtggtaagaaccctggtgaggaagaccctcgcttaccctgatacagagagaaggtgtaaaataacttaatgggagaccattaggctgcgatagttcccatggctgggttcctacatagacaaaatgaaacaagcttcacccatcacaagtggccagctgaatattagctgtgtaatgagtggccttccaccaggatagttcaaataatgcaactgcccaaattttcgccaatcaaataatttatctactctacttctacatccaccctataaaagccttccctgcaaatgcctccagtggatcctccaaccactttcagtttggggctgcctgatccatgaatctctgtttgctcaaataaactctttaaaattttaatatgctcaagtttatattttttttccattttaaaaattgagatgggatcttcctatgttgcccaggctagtcttgaactcctgagctcaggcaatctgcccatcttgccctcccaaaatgctgggattacaggcgttggccaccacgcctggccacaaaaagtctgcgtgtatggtagcttcaaaacccatttgtaaataggtgttttcataacaagatgaaaacaagaaaacattgaacttcatataatagaagggttctgcctggatttgcatgtgggccccatcatttgtttgctgttgggccatggtcaggttacttcctccacatagggtttaagcctgtgcatccttcatctacaaaatgggaatattaagaatatctaacaattagaagtggagaaaacatatgtaagggcctttgacaagagcttgtcaaagctcaataattgcccttaataattgttagctatcattcaataatcataatcataaaaatatatgactcaaagaaagattcctacttcatatctggcttctcaaaagaatatcagaaattggacctgtgaaaggaatgacactgagatgtattttcacattgctaagttggttttttctctttgccatttaatttctgcagtccccactctaagcccatggttcaccattttattcttcctcctaaaatttcttcccttctggtaagattatctttgccttaacaagggcccttttcatccacccactcccttacccttcccagaagtggttaatgggcacaaaaatacagttagatggaaagaaaagaacttctagtgttcaatagcacagtagcatgacgatcgttaacaataacttaccatgtatttcaaaatggttagaagaaagatttggaatgttcccaacacaaacaattgataaatgtttgaggttatggatatgcaaattatcctgatttgatcactacatattgtatgcatgtatcaaaatatcacatgtaccctagaaatatgtataattgtcatgtatcaataaaaacaaaaagggcctatttctctttgccttcctccccaaattccctcctgtcccagatatgtgttgttcctggtgctctcctgccccccgttcattcagcactgagccagcaggaaggatctcacaggtcatatcctgagatccagccctccaccccttcaggtaataatcctcctgcttttggtcattcgtatcctttggttcatagatattttgagtctagtgccttctaattgctgacctaaataataacccttggtttttaaagataatacaaagtggatttcagtaacaatcttgagtcttcacagaagctaatgaagtcagggattccatgaagccatccaagcatatagagctcatttccctgggtcccttttccttagctcaaggccacacaaaatcagaacatgaattccagcccacatttgcattatgtcgaaataattatgagttacaaatgaagctaacaaatagctaaatatgttctattcatctactttgataaatataccgccataataacccacaaggtcaaagttgagtgtagaattctcagattctttggtgctctgcacgagaatgtggtagcagaaggagagccaatcctcagccccaggccaaacttttccctttcatcgtaggtagccctgtcctcacttgagaagccttgcgtacccccgtgtgggggactccctaggccccatgcaagctccatccacatttctcaccccttcagacagcagagtcttgggcaccatttggacaagcagtttgcgctttgaaataaacccaggggagaggccatgcaggctcaggcacatttggccaggtgtctgagtgcccagagtatggcctagaagagaacgtgagagctctgggtgggccggggtacagtcagtggagggccagagaggcaccttctcaagcgcaggattcagggcaggggtcctcttgccgagatggatggctacgattgctcagtgcaatggcgcctgcgtcatgtcttctcagcgcatctttcactcagtctcagccaccatggggagttccatggaagcgcaggcttcccctgtgctgccagtaaactcaagctacactttctgccccagggcatctccattattttggagattataggattttggctgagcacaaacacacagcccagaaacacttgcaggttaacagcctcaggggaagatctcaaccagtgtgggacaggtgggcaaatgctccaggctcctgtttcaggtggacagttcgggaagactttccggagactctcagaaggttctggcagaaaagaagtccatggcagcagcctcaatagcatgcctcaatagcaggcctcaggtgatccgtccaccttggcctcccaaagtgctgggattacagacgtgagctatcatgcccagcaacataacatttatatgcacaggaaagcaaaaaatgtcgtgtgactagctctattgcgatattcgccttgttgtggtgacctagaaccaaacctgtaatatctccaaggtatgcctgtacccctaaaagaagagctggagtaaggacctgggtgtgggtggtttatttgggaagtgatcccaagaagcaagagtgagaagtggggagagtgagccaggtgagaaagaaaagccaaaatgatggcattgtttgaaccccggaggcagaggtttcagtgagccgagatcatgccactgcactccaacctgggtgacagagcgagactccgtctcaaaaaaaaaaaaagttgtgtttacactattgtagtcaattaagtatgcaatagcgttatgtttaaaatataatgtacataccttactttgaaaatacttgattgccaaaaaatgctaaccatcatctggtccttcatcaagtcgtaatcattttgctggtgcatggtcttgcttcagtgttgatggctactgacttattggggtggtggttgctgaaggctggagtgggtgtggcaattccttaaaataagatgacaatgtagtttgctgcattgattgactcttcctttcaccaaagatttcactgtagcatgctgtgcagcttgatagcatcttacccacggtagaatttttatcagaattggaatcagtcctctcaaaccctgctctatcaactaagtttatggaatattgtaagtcctttgttgttctttcaacaatgttgacagcatcttcaccaggagtagattccatctcaagaaaccacttctttgctcattcataataagcaactcctcatccattaagattgcagctatttggcagggcgcggtggctcaggcctgtaatcccagcactttgggaggccaaggcaggaggatgatctgagcttgggagttcgagaccagcctcacctacatggagaaaccccgtctctactaaaaatacaacacatggagaagccccgtctctactaaaaatacaacattagccggaatggcagtgcatgcctataataccagctcctcgggcgtctgaggcaggagaatcgcttgaacccaggaggcggaggttgcagtgagtcgagaacgcaccattgcactccagcctggacaacaacaatgaaactctgtctcaaaaaaaaaaagaaaagaaaagaaaaaagattgcagcaattcactcacatcttcaggctccacttgtaattctctttctcttgttatctccaccacaactgtggttacttcctctgctaaggtcttgaacccctcaaagtcatttatgagggttggaatcaacttcttccaaactcctattaatgctgctacttttacctcatctcaagaatcatgaatgttcttaatggcatctacaatagtgaatcctttccagaagttttccaatttactttgctgagatccatcaaaggaatcatgatctatggcagcaacaggcttataaaatatatttctcaaataataagacttgaaaatcaaaatgacacccaatccatgggatacagaatagatgttgtgttggcaggcatgaaaacagcattcatttccctgtacatctccgttagagctcttgggtgaccaggtatgttgtcaataagctgacgtatttgaaaggaatctttttttctgagcagtaggtctcaacagtgggattaaaatactcagcaacacatgcagtaaacagctgtgatatcatccaagtgttgttccacttatagagcatgggcaaagtagatttagtataattcttaagagatgccctaggatttatggaatcacaaatcagcactggcttttaacaagagagtcagcctgtcctttgaatgtttctttctttttttttttttttgtgagatacggtctcactctgttgcccagactggattgcagtggtgtgatcttgggcaactgcagacttgacctccttggctcaagtgatcctcccacctcagcctcctgagttgcttgtaccagaggcatgcaccacaatacatagctactttttgatttgtttttttgtttgtttgtttgttgttgttgtttgtagagacagggtttcaccatgttgcccaggctggtctcaaacttctaagctcaagcaattttcccacctcagcctcccagagtgctgggattacaggcatgagccaccgtggctggcccctttgaagctctgaagccaggcatggacttatcctctctatccaaagtcctggatggcattttcttccaatagaaggctgtttcatctacattgacaatccattgttcagtatagccaccttcatcaatgatcttagccagatcttctggataacttgctgcagcttctacaacagaacttgcagcttcatcttgcactattatatcatagagatggcttccttccttaaacatcgtgaaccaacctatgctaacttcagacttttcttctgtagcgtcctcatctctctcggccttcataaaatggaagataattagggccttgctatgtattaggctttggcttaagggaatgtcgtggttgacttggtcttctatccagaccacttaaactttctccataccagcaataaggctttgttttctttttttaatattatagaattggtttattgtaaaagcaattgaagaataccagttaaaatcttatcccaatgctacccaatagaaccaagaagcagttaagcaccttttacattaggaacaaggacataaaacaagataccacataaaggctatgattcaaactcaaaaagagaaaggactcttgggtctccttcaggtcaataaagaggttatcataagatcaaagcactgtgccaggtatcacagtactgttacaacactgaggtataactggacaaattaaagttgcagggaaatgaagatctccatactattgttttgtgggtgtacttaagtgattaaaattctagaaacagctgcctttaatgacaggaagatgtaagacaagtgtttattaaagagaaggaagcttataaagttctctctcaatgtcccccaaatcttcacagccccccaaacttcccaccctcctcctaagctaaaactactcagctttatgatgcagacttaatttatggcttactggaaaattataggcactccttccaagtagctttcatcttctgcacattaaaaaaaaatcccagccgggcatggtggctcacacctgtaatcccagtactttgggaggccgaggtgggagggtcacctgaggtcaggagttcaagaccagcctggccaacatggcgaaaccccatctctactaaaaataaaaaattagttaggcatagtggcacactcctggaaattctcctgaggcaggagaatcgcttgaatccaggaggcggaggttgcagtgagctgagatcatgccactgcactccagcctgggcgacggagtgaaacactatctcaaaaaaaaaaaaaaaaatcccaacaacatgttacataatttatatacccaattttgctttaatctttctgctgttttcgtaataaaagccttacagtcaattattatgagtgatcagcctataaacttatatataatacagtgattgcattttttgagcactggaagtacttaaaacttcttacttccaacttttgcactcctccgaaatgaagggccaaaatacttagattttgtaattgggaggaaaagcaatctgtcttctcaagatgatgcttttcatagcagcttttgccaggggaagcgattttatatctgtaataaatccttgaaaataagcgcttattctagaaacattggaagatccttaaaacatagaggtgctagctggtaccatttaaattcacaaccagctattactttatagcttatattgaagagttcattcatgctcattattttcctttaaaaaatataaaaaatactctttagaacccattattactcctgtagacacatacactttttacagcatttctttctgtaaaaatgaaggtataatcatgattatctctatttctttgctaaattcaactgtcaatatacatttattaacctgatcacttttccaggtaactcaagactttgtagtattctctccagcgtctattttcttttttcttttattttctgtttttctttttaatggagacgaagtctcgctctgttgcccaggctggagtgctgtggcgtgatcttggctcactgcaacttccgcctccccagttcaagcaattctctccctcagcttctggagtaactgggactacaggtgcccaccatcatgcctggctaatttttgtatttttaatagagacagggtttcaccatcttggccaggctggtcttgaactcctgaccttgtgatccacctgcctcagcctcccaaagtgctgggattacaggcgtgagccactgcgcctggccctccagggccaattttcagcatatagaagtaggagtaagacttacaagtaagaatcatcctgaaggcaattttttcatatagtctttaatgtgttcatcacaaatgagaacttgagaactacaaactagaatttatttccaaaactaaggcaaaggtaaacttccagaactaaatgtaagtaaaccactataaagcttatttctgtcatgcaccttatgaacctactcagtaatttccaaacaagactcaaattagtccaagggagtccaagggggaaaataaagccacttctggtttgctcttttccaattcatcagataatatctattgtgtgcccagagggcatggagtactcccctaggcactatccgtagtaattagggctttgtttttttattatgcatgtttttgctggagtagcacttttaatttcctttgagaactttttctttgcacttacaacttggctaactttggcacaagaagtatagctttcagcctaggttttcaacatggccttcctcattaagcctaatcgtttcttggtgttgagtgaaagtgaaagacatgtgtcttcctttaatttgaacactaagaggccatttgaggattattcattgacataattttaatatttttgagtctcaaggaagagagagagccaaggagagagagagagaaatggctggccaggggagcagtcagaacacatacaatttttatcaattaactttgccatcgtatagggacctgattcatggcctcccaaaatagttacaacagttacctcaaagaccacctatcacagatcaccataacagagtaatagtaatcgaaaagtttgaagtattgtaagaattaccaaaatgtgacagagtcacaaactgagcacatgatgatagaaacgtggcacagatagacgctccacacatggttgccaaaaccttcaatgtgtgaaaaacacagtatctgcaaagtgtaacaacatgagttatggcttcactcaaaagaataaagggacaaatcgaggaaatgaaaggaccagtccattccaagtacagcaatatcatcagcactatctcactggagtccttcaacaacaaaggcaaaaagtatcctcaacacatttatattataacctaaattcctgttaaacaggtttcggggatttttaaggggctggcccctttattctttcctctatgttaatttttaaattccttatttatttatttattttttttagatggagttttgctcttcttgcccaggcataatctcagctcattgcctcagccttccaagtagctgggactacaggccctgtcaccatgcccagctaattttgtatgtttagtagagacagggtttcaccatgttggtcagtctggtctagaactcctgacctcaggtgatccgctggcctcaacctcctgaagtgctgggattacaggcatgagccaccatgcctggcctctaaattgctcttatggagactcattttcatggttaaaatgtcctgaattgactgtggcttgttggtgggaggagggatggaggaagctacttatggaaaatgaacaaggaagggaagcacaccagaagctagaaagtgtcatcaatttttacatcaaagactccatgacaaagagaaagtacaagtagcctgtttttgtagctgaccattggactgcggactgcacatgcagctaccaggttcttctggatagtcccagttttaaatttttgacctgatattcatgaacatagtgctactggtcagacctttgtccaggtttaagcttcagaaaataaggtcttcatgcagtgggaggcctggttaggatcatgattctgccctggggcatctgccacttctgacctggagataaacttggcatctactatttacctccacattttaacagccaaggatgggctgagcacagtggcttacatcaggaactccagcaatttgggaggccaaggcaggaggatcacttgaggccaggagttcaagaccagcctgggcaacatagtgagacattatctttgtaaaaacaaacaaaaccgaggatcggtgggtggcagggagcagatcaacctgggcaaccattaatctgagagctggaaggacccttagaccagccccccagtaacagatgagactctgctctgggattatagcctaaggtaatgccctgagcttttctagagatttgaaaataattaatcctaaaacccccaagcacactgctactgtttgctatttaataatgttttccaggccgggtgcggtggctcatgcctgtaatcccaggactttggaaggctgaggtgagcggatcacctgaggtcaggagttcgagaccagcctggccaacatggtgaaaccccatctctactaaaaatacaaaagattagccgggcatggtgctgcttggaaggctgaggcagtgaggcagagtttgcaatgagccgagatcgcaccattgcactccagccaaactacaagagcaaaactccatctcaaaaaataataatgataataataatgttttctacaagcaaggggttactttgtactgtgaactggtgtgaagggatccaccatatgtaagcttttggagctgattttattatctgtgttgtcccaagtggtgaagggaagatggcacaccaaaatgggggcattggtgccagtgcatcaggtaaataggcatctaaagctctgagaatagactgctactatgcattataatcaatgctacaataaccttgtaggtttcttttcatgatactgcttgctaagttttttctgtttgcttcaccatattttgaacaattttctattaaattaggatattttaaaagtttgccttttcaatgtcttatttagataaattctgtagttccaaagttatatattttcaaagcctgatgcctttgatgtttgatgatgttaacaatatactattttcaaagccagtttgttatttctacactgatattgggaaaagaataaagtgatgaagtcaacaggtgttattaaaaatgtgaataacaggtaaacgttttgttatttgttttgttttgtctttgaagtatttcacagactagatttgaaggtttatgaaggatggggcaaaattatctaaggaaagttgcatcctatgacctcaggctgacttcaagtaagagtggatttgttaaaggcattgtctttcttggactatttgcatctttgtagaggagcctggagaggcagtatagaaggattgttttagatgttggatctctgtaacctccatttacgttttcttgagccattgtcatttggggaaaagcatgaaaaagaaaagatcattataatgctactgtaatgcacatcacatagaattgcaatgatttgttgattgttcattccaggccaagaacagtgagtttctccagccaaaggccttgtatttattgatctttctgtcccacaggcctaaaacagtggttggcccatggacagtttaataaatgtttgctgactaatatgtagcatatctaaaaccttttccatggccttgtctctggagattaagattttccagcatttgtacataaaagatgttgatgcataactgtaggtgaaaggcacttcttacatggcagtggcaagagaaaatgaggaggaagccaaggcagaaacccctgataaacccatcagatctcatgagacttattcactatcatgagaatagcacaggaaagactggcccccatgattcaactacctcaccctgggtccctcccacaacatatgggaattctgggagatagaattcaagctgagatttgggtggggacacagccaaaccatatcaccaaatatggagagactggatcaacaagatcatctcaaactaatacaggaggtgagagtttaaattagaacaaccactttggaaaacaataggattatcttataaagttgagcattctcatatgttatggcacagtaattcctctaccaaaggccctggagaaactcttgcccatgtgtacccgaagtagtaaaaaaagaaaataaatgctcatgtaatgccattcataatagcaaaaatctggaaataagccaaaagttcattaatactagaatgggtacattaataggagaatgggtaaataaattatacccttaaaaactgaataatatgttatttatggcaatcatatatatgcaataaaacaatttttttaaaggaatggaatcctaaatataaattcagggtagtagttaccgctggggctgaaaggtgtgaatcaggaaaaaaagacagaggaagagcagatgttaggatcagaacctagttcttgggttgtgtggtgggttcacaagtgattaccatgttgttcaaatacattcaaatacatttacatacaggccaaggcacaggcaaggatgaaataggagccaaggtatgctgtgagccaaggattatgattgatccaattttgtgcactttaagccatttgaaaaacagaaaagcaaaacaacaaaataatttttaagaaattgaatataaggtgctaatttttaagaaattgaatataggcaaggatgaaataggagccaaggtatgctatgagccaaggattatgatttatccaattttgtgcactttaggccatttgaaaaacagaaaagcaaaacaaaataatttttaagaaattgaatatagggtgctaacttttaagaaattgaatataggcaaggatgaaataggagccaatgtatgctatgagccaacgattatgatttatccaattttgtgcactttaagccatttgaaaaacagaaaagcaaaacaacaaaataatttttaagaaattgaatatagggtgctatggtctgaatgtgtctccctaaaactcatcaccaatgtcatagtattaggaagtagggcctttaggaagtaattcagtcatgaagggagagtcttcatcaatgggttacacaaagactggagggagtgggcttcccctgttttgcccttcctccttctgccatgtgaggacacagtgcatcccctcctgaagacacagtgcacaaggcattatcttagatgcagagaccaggccctcaccagacaccaatcctagtggcaccttgatcttggacttccagcctatggaactttgagaaatacatttctgttcttcataaattacacagtctagtgtattttgttatatagtagcacaaacgcactaaggcatagtgcctcgtcattttcttctagaattttctttgttgcctgtctagcagtgtgccattttatatttgatccttcgtaatatctcttacttttggatttttacatttctgttgcaagtgtattcttaggtacatgtttttcactatttgttagtgtccaggtcagaaagtccagaatacattctcttaagggttcagtttctgcagcaacgtaagtattaatgcctcctgtgaactaggtatttcctttccaattgtaactgccatctggaagcgaattggaattacagtctatgagtgtgggattgatttttaatgtatctgggttatggttaaatgctggtttttaatcacacagattcatcgatggcttggcacactagagcatcacttgctagttatctctatatttttccatgctgttagagagggaaagtacagactgtgaagttggaccagctgtcatacacacaacatttggggagctttgatttttttaaaacctttagctgcttaactgtcacatgtagcagctcaggtgaaaggcacttttattgtggggactttcccttagtgctctgtggtgcaagagcagacctatgtagaagcatttaagtattttgtgcatcaacaggacaattataggaaaaaattttttaaatataattttatttcattttctgcattacttagaagcatcagtaggatgaaaacaatatttgtttcttaaacctgtgcacaaattaattgatgtgacacacattaattcatgattattttcttaatgaattgattctaaagcttctctaagataggaaggcataagacaaccaaaaagaaatattgatttataactgttctaatactgctcagcatttttaaagtacactatagccagaaagcatgttataattactaataagataatccacagaatgccttgctgagccaggtaggtgtagaagaaataaattgtttcatattggaggaaagtgaacactataaatcaatatactagtgtgaaattttgcatggctacatgctatcatcaccagcatcacaaatgacttaaggaattcctcagatgagagtggactcctattggtggccacaatgtcacactctttttttaattttttaatttttatttaaaaattttttttaatatactttaagttttaggatacatgtgcacaacgtgcaggttagttacatatgtatacatgtgccatgttggtgtgctgcacccattaacttgtcatttaacattaggtatatctcctaatgctatccctcccccctcccccaccccacaacaggccccagtgtgtgatgttccccttcctgtgtccatgtgttctcattgttcaattcccacctatgaatgagaacatgtggtgtttggttttttgtccttctgatagtttgctgagaatgatagtttccagcttcatccatgtccctacaaaggacatgaactcatcattttttatggctgcatagtattccatggtgtatatgtgccacattttcttaatccagtctatcattgttggacatttgggttggttccaaatctttgctattgtgaatagtgctgcaataaacatacgtgtgcatgtgtctttatagcagcatgatttctaatgctttgggtatatacccagtaatgggattgctgggtcaaatggtatttctagttctagatccctgaggaagcaccacactgacttcacaatggttgaactagtttacagtcccaccaacagtgtaaaagtgttcctatttctccacatcctctccagcacctgttgtttcctgacttattaatgaccgccattctaactggtgtgagattgtatctcattgtggttttgatttgcatttctctgatggccagtgatgatgagcattttttcatgtgtcttttggctgcataaatgtcttcttttgagaagtgtctgttcatatccttcacctactttttgatgaggttgtttgtttttttcttgtaaatttgtttgagttcattgtagattctggatattagccctttgtcagatgagcaggttgcgaaaattttctcccattctgtaggttgcctgttcactctgatggtagtttcttttgctgtgcagaagctccttagtttaattaggtcccatttgtcaattttggcttttgttgccattgcttttggtgttttaacatgaagtccttgcccatgcctatgtcctgaatggtattgcctacattttcttctagggtttttatggttttaggtctaacatttaagtcttcaatccatcttgaattaatttttgtataaggtgcaaggaagggatccagtttcagctttctacatatggctagccagttttcccagcaccatttattaaatagggaatcctttccccatttcttgtttttgtcaggtttgtcaaagatcagatggttgtagatatgcggcattatttctgagggctcttttctgttccattggtctatatctctgttttggtaccagtaccatgctgttttggttactgtagccttgtaatatagtttgaggtcaggtagcatgatgcctccagctttgttcttttggcttaggattgacttggcaatgcgggctcttttttggttccatatgaactttaaagtagttttttccaattctgtgaaaaaagtcattggtggcttgatggggatggcattgaatctataaattaccttgggcagtatggccattttcatgatattgattcttccaacccatgagcatgtaatgttcttccatttgtttgtatcctcttttatttcattgagcagtggtttgtagttctccttgaagaggtccttcatgtcccttgtaagttggatccctagatattttattctctttgaaggaattgtgaatgggagttcactcatgatttggctctgtttgtctgttattggtatataagaatgcttgtgatttttgcacattgattttttatcctgagactttgctgtagttgcttatcagcttaaggagattttgggctgagacaatggggttttctagatacacagtcatgtcatctgcaaacagggacaatttgatttcctcttttcctaattgaataccctttacttcctactcctacctgattgccctggctagaacttccaacaccatgttgaataggagtggtgagagagggcatccctgtcttgtgccagctttcaaaggaatgcttccagtttttgtccattcagtatgatattggctgtgggttgtgggtttgtcatagatagctcttattattttgagatatgtccaatcaatacctaatttattgagagtttttagcatgaagggctgttgaattttgtcaaaggccttttctgcatctattgagataatcatatggtttttgtcattggttctgtttatatgctggattacatttattgatttgcatatgttgaaccagccttgcatgccagggatgaagcccacttgatcatggtggataagctttttgatgtgctgctggatttggtttgccagtatttcattgaggatttttgcatcgatgttcatcaggaatattggtctaaaattctcttttttgttgtgtctctgccaggctttggtatcaggatgatgctggcctcataaaatgagttagggaggattccctctttttctatttattggaatagtttcagaaggaatggtaccagctcctccttgtacctctggtagaatttggctgtgaatccatctggtcctggactttttttggttgttaagctattaattattgcctcaatttcagatcctgttattggtctattcagagattcaacgtcttcctggtttagtcttgggagggcgtatgtgttgaggaatttatccgtttcttctagattttcagtttatttgcttagaggtgcttatagtattctctgatggtagtttgtatttctgtgggatcggtggtgacatcccctttatcattttttattgcatctatttgattcttctctcttttcttctttattagtcttgctagcagtctatcaattttgttgatcttttcaaaaaaccagctactgaattcattgattttttgaagggttttttgtgtctctatttccttcagttctgctctgatcttaggtgtttcttgccttctgctagcttttgaatgtgtttgctcttgcttctctagttcttttaattgtgatgttagggtgtcagttttggatctttcctgctttctcttgtgggcatttagtgctataaatttccctccacacactgctttgaatgtgtcccagagattctgatatgttgtgtttttgttctcattggtttcaaagaacatgttgacagtggggtgttaaagtctcccattattattgtgtgggagtctaagtctctttctagctctctaaggacttgctttatgaatctgggtgctcctgtattggatgcatatatatttaggatagttagctcttcttgttgaattgatccctttaccattatgtaatggccttctttgtctcttttgatctttgttggtttaaagtctgttttatcagagactaggattgcaacccctgccttttttgttttccatttgcttggtagatcttcctccatccctttattttgagcctatgtgtgtctctgcacgtgagatgggtttcctgaatacagcacactgatgggtcttgactctttatccaatttgccagtctgtgtcttttaattggagcatttagcccatttacatttaaggttaatattgttatgggtgaatttgatcctgtcattatgatgttagctggttattttgctcgttagttgatgcagtctcttcctagcctcaatggtctttacaatttggcatgtttttgcagtggctggtaccggttgctcctttccatatttagtgcttccttcacgagctcttttagggcaggcctgctggtgacaaaatctctcagcatttgcttgtctgtaaaggattttatttctccttctcttatgaagtttagtttggctggatatgaaattctgggttggaaattcttttctttaagaatgttgaatattggcccccactctcttctggcttgtagagtttctgccaagagatcagctgttagtctgatgggcttccctttgtgggtatcccgacctttctctctggctgcccttaacattttttccttcatttcaactttggtgaatctgacaattatgtgtcttggagttgctgttctcgaggagtatctttgtggtgttccctgtatttcctgaatttgaatgttggcctgccttgctagattggggaagttcccctggataataccctgcagagtgttttccagcttggttctattctccctgtcactttcaggtacaccaataagacgtagatttggtcttttcaaatagtcccatatttcttggaggctttgttcatttctttttattcctttttctttaaacttctcttctcacttgatttcattcatttgatcttccatcagtgataccctttcttccagttgatcaaatcggctactgaggcttgtgcattcatcacatagttttcgtgccttggcttttggctccatcaggtcctttaaggacttctctgcattggttattctagttatccattagtctaatttttttcaacgtttttaacctctttgccatgggttcaaacttcctcctttagctcagagtagtttgatcatctgaagccttcttctctcaactcgtcaaagtcattttccatccagctttgttccgttgctggtgaggaactgcgttccttggaggaggagaggcactctgatttttagagtttccagtttttctgctctgttttttccccatctttgtggttttatctacctttggtctttgatgatggtgacataccgatggggttttggtgtggatgtcctttctgtttgttagttttccttctaacagtcaggaccctcagctgcaggtctgttggactttgctggaggtccactccagaccctgtttgcctgggtatcagcagtggaggctgccgaacagcggatattggtgagcagcagatgttgctgcctgatcgttcctctgaaagttttgtctcagaggagtacctggccgtgtgaggtgtcagtctgcccctactggggagtgcctcccagttaggcttctcgggggtcagggacccacttgaggaggcaatctgtccattctcagatctccagctgcgtgctgggagaaccactactctcttcaaagctgtcagacacggacatttaagtctgcagaggattctgctgccttttgtttggctattccctgcgtccagaggtgaagtctacagaggcagcaggcctccctgagctgcggtgggctccacccagttggagcttcccagccgctttgttcacctactgacgccttggcaatggctggcgcccctcccccagcctcgccgcccccttgcagtttgatctcagactgccgtgctagcaatgagcaaggctccatgggcataggaccctctgagccaggcatgggatataatctcctggtgtgccatttgctaaggccgttggaaaagctcagtattagggtggagtgatctgattttccaggtgccgtctgtcacccttttctttgactaggaaagggaattccctgaccccttgcgcttcctgggtgaggtgatgccttgccctgcttcagctcatgctgggtgtgctgcacctactgtcctgcacccactttctgacattccccagtgagatgagcctggtatctcagttggaaatgcagaaatcacccgtcttctgcatcactcatgctgggagctctagactggagctgttcctattcagccatcttggctccaccgaacaaatttttattgtatcttttagtctatgaagacaaaaccacagtgacagtaactaggtcaaggcattgtattcagagagcgtcagccttggtctttgagagtgagtcctttttaccacactgttaagactcactgagcagatgggaaatttcaggtggaacatgcagtgaatagcaaacacggtggagggtgctcactgtcatgcgctgccatgcctgccatggtcaacagacctgtcttgtccttgacaacaggcaggttgataaacattttcttggagagtttcttgattcttctcagttgtagcaggatggactgacttagaggagctcaggaagattgttatacaacacagaaacacaagatgaattgtactcctcagcaagcctaagttagagcagcaggtccttgaagcctcagccactcctgggacatagcataatgcccctaatgatttgaaatttagtggagagtgggttgctactccctgtgtccaggaacaaaaagagacataaagagcaaaaagttataaaataagtgggactaatatctgcttattttgggaggtagggatttaagatacaagaattcagctgcatgtggaagcttacatctgtaatcttagcacttggggaggccaaggcaggaggatggcttgagtccaggagttggagatgagcgaggcaacatagtaagtccccattcatacaaaaatgtttctgaagaaaagtagttcagtgaggtggcacatgcctgtagtcccagctatgtgggaggctgaggcaaaaaaatcgcttaatcctgggagattgaggctgcagtgagttatgatcacaccaatgcactgcagcctgagagtcctgaaaccccagccggcgacctgaagctcctcctccaccggtaaaagtcggctcaaaaaggccctgaggacaggggtcctgggggtccggccccgaagtcccctctccaacaacgcccgctactccatcaacactccagccaccacagcgactgccacaggagcccccgtccacgcagagccgaaaccgtttaaaggggctacagcctgacttccaagggcaaagcacgagtcggcttaggcaatgcggatgcatgaggcgacaccgctactcctgtcacagtgaccccaatggttgcctgaggacgactccatcaaccttgacaaagcaggagccgtccgtggcagtgcgtcagtgttgaggcgccaggctgacatctccagaaggtcaacaaaactgtttcaggattccaggagacacggaggggcaaacaggatgaagaaacagcaggcggagtctgggaaaagcagcgcggaattccagcccgaggcctgcccggatggtgtttgggtgagtctccccaaaagtcgtgccccacatcatctcgaggaagcgtctgcctgtgtgcccgtggactactctctaaaccgatggttgttcttttgaaaagcagaaccccgcagcctcaggggttgcctggggtggtgtgtttccgttccactgctgtgtatctgtgagtgtgtctcccattctctcttctctctctgtctctcactctctgtctctctctctctctctctttctctttctgtgtggcagggagccgaagggacgggactggggctgggtacaggggaggctgtgtcagggctacctaggcgttggaggggtggggatggggtgaactttgcagaaacctcttcgctcctctgacaggcatcccaaaatgtggcttggactcacacacaggttctctcctggttcccaggtgggctatgcttttatgtggcgttgacagggaggtcacctgtgccccccttccaccaggcacatgcctggacacctttcttcatcttggcatagccccatatgggctcggtgacacacactcaccccatcttctcttggggacgccagtgacacgtgtggttgcattggctccaccttggactcgcccctgtccctgtttgcacttgtcctggaaagcggtgtcttctcgcaggagccccagggctttgggaagcaggacaggccactggtcctccaagggaggagggaggcagagggctcatgggtcagtgaattttcagctgacaccacgccttgaggcccatgggatctttctgtgccccagtgaggcccttcccacctcaacagataaggtgaacccatccctgctcacctggtgggattcaaaatcagatctgaggaggaatccaaagacccgagcaggcgccctgaagctcctcctccaccggtaggagttggctcaaggaggtcctgaggacaggactccgggagtgcggccctggggtgcctacagccctctctcccacgtcgccgcctaccggaccggggatccagccaccgccagggttgcagccaaaggcccctgcctctgcgctgccgccattgcttaaaggggcttcagcctgacttccagcagcggagcgcgagtcggcctagccaatgcgcatgcgcgaagcgccagccaattctcccatcacagtgagtcccacggttgcctgagtaaccactccctgaggcttggcaaagcaggagccctccatggcagtgcttgggtgtcggggctttgaggctctggcctgacctctccacgggggcgacaggaaggtctccggatgccaggagtctccaaggactgaccagggtgacaaaaccacaggcagagtccaggggaagcagtgcggcatccaagcctcaggcctgcccggacggggatcgggtgagcctccccaaaacttgtgcaggccatgatcttgaggacaggtctgcctgtgtgtccataggctcctgtctcatcccagtgtcgatctcgtggagagcagaaccccaaagcctcaggggttgcctggggctgtgtgtttctgtgccactgctgtatgtctgtgtgtgtgtctcccattctctcttatctctctgtctctcactctctgtctgtttctctctctctctttctctgtgtgtgtgtgtgccagtgtgggtgtgtgtgttgggatcaatgtgccctgtgcgccaaaaagcgatttcttgcatgtcaacctgtttttggtgagccttttttttggtctctgcctgggtcatgtggccggttgtcaatcgttttcgtggtggttccactttgggattgtgaaggcctcgaccacatgaggagatgcgtcggtcccggagcaactggaatctcatccccatcctgagcggcttttctagaatcaagatgaccacacttcagccaaggaccaaagcctcataggagctcattctcctgcaggaggggagcagaccgatgtcaaaggagatggttgtatctcctcgcggcttttctctgagaaatgaagccacaccacgatacagtcttaaagaggaagccaggaaccggagatgacaacaatacctgctgtcactggaatgctggcctctctggacaagtcacccatttgacactccttcccttaaccctgtcggtgacactgtgctgtgtcttgcctgggatctggcctctgctctgtcctccctcttgctctgtctctcctgtttctgaggggcctagatgcttcttggtctggctcaatgtcttcaacaaagaacacttcccagtccatcagggagaaaattcgtggagatccgtgtcataattgtttctctctccaaacctgtttctggttgattcggccggtttgactatcctggaactctgggcttccatacctgtttcagacagggaagctcccttggtctccaagtttcacctcatggctgggtggattgcctagaatgagcggtaggcgatcatggctggccttggcgtctaggaaaggccgtgcggcatttcctctgcacttcctgtcttattattgagagacatcctcccctctgcttctggatggactgcctcccagaactgaatctttcagctctcacaaatgtcagggatccaaagggcaagggctggggctgggtgcaggggaggttgcctcagggctacctaggctgtggaggggtgagggtggggtgaactatgcagaaacctctccgctcctagagcaggcatcccaaaatctggcttggattcaggcacgggcccattcctggttctcagaggcgctatgcttttccttggcgttgactgggaggtcatctgtgtccccccgcatccaccgggcacatgcccagacaccattgttcgtctcgcaatcaccccatatggcctcggtaatgcacactcacccaatctgctcttagggaagccagtgccacgtgtggtctcattggctctacctcggactcgccctatccctgtttccacgtctcctggaaagtggtgttggcttgcagcagccccacggctttgcgaatcggggcagcccacagctcctccaagggagaagggaggcagagggctcgtgggtcagcgaattttcagctgataccacgccttgaggcccaagagatcatcctgtgctgcagcgaggccctgcctgcctcaccacatgcctcccgcctgagcccatccctgctcacccagtgggatccaaaatcggatctgaagaggagtcctgagagcccagcaggcgccctgaagctccccctccaccggtggaagtcgactcaaggaggccctgaagacaggactcctgggggtttggccctgggacgcccgcggccccctctcccacgccgccctctactggaccccggatccagccgccgccgcggctgcagcaggagcttccctgccttagcgcagccgcgccgccgccattgtttcaaggggccgcagcctgacttctaggagcggagcgcgagtcaaccccgccaatgcgcatgcgcgaggcgcgagcggattctcaccgttgtcttagaaaccagtccctgaggcttggcaaagcaggagccctccgtggcagtgcttggctgtcggggctccgaggctccggcctgacctctccacggggtcgacaggaacgtctccggatgccacgagtcgcacagagctgtcgaggatgacgaaaccacaggcggagtctgggggaagcggcgcggcatcccaggctcaggcctgcccggacgtgttagggtgagtctccgcaaaagtcgtgcccgccgtgatctcgaggacaggtctgcctgtgtgctcgtgggccgccctctcacctgagggtcgttcttgcggagagcagaaccccgcagcctcaggggttgcctggcatttctgtttctatgccactgctctgtctctgtctctttctctctctctctctctcactctatctctgtgtgtgtgtgcgtatgtgtatgtgtgtctgtctgtgtcccattctcttttctctgtctctcacttcctgtttctctctctccctctgtctgtatgtgtgtgtgcccatgagcgtgtgtgtgttgggacgtatatgccccctgcgccaaaaagggatttcttgtatgtccgcctgtcgttggcgagcctttttctgcgtctgcctgggtcacgtggctggttgtctcgttttcgcggcggttgcacttcgggtttttgaaggcctccaccacctcaggagatgcgtcggtcccagagcaactgaagtctcatccccatcctgagtggtctattctctagaatcaagatgaccacactccaggtaaggacaaaagcctcccaggagctcattgtcctaaaggagggaagtagaccgacctcaaaggagatggttgtatctcctcgcgtctcttctctgagaaacgaagccacaccacgatacaatcttaaagaagaagctgggatggggacacggcaaggatccctgtcactggaatgctggcctctttggacaagtcacccgtttggcactcctcccctcagcccgtggcggtggcactgtgctgtatcctgcctgggctctggcctctgctctggcctccctcttgctctgtctcttctgtttctgaggggcctagatgcttcttggtctggctgaatgtcttcaacaaagatcacttcccagtccatcagggagaaacttcatggagatccatgttctgattgtttctctctccaaacctgtttctgcttgattgggtaggtttgatgatcctggagctcttggctcccatacgtgtctcagacagggaagctaccttggtctccacgtttcacctcatgtgtgggggggattgcctagaatgagcggtaggcgaccgtgactggccttgtcttctaggacaggcgctgtcgcattttctctgcacttcctgtctcattcttgagggacatcctctcctccgctccggggtggactgcctccctgaatcttttggctgtaatgaatgtcagggaaccaacgggactgggctggggctgggtgcaggggaggttgcgtcagggctacctgggcggtggagggttgagggtggggtgaactttgcaggaacctctttgctcctccagcaggcatttcaaattgtggcttggactcacgcacaggccccctcctggttcccaggtgttctatgattttcgttggcatcgatggaaaggtcacctgtgccccccttcctccggaacatgcctggacaccattgtttgtttcgccatcgccccgtatgccctctgtgacacacattcacagcatctgctcttgaatacaccagtgccacgtgtggtcacactggctctactttggatttgcccctttccctgtttgcacgtgtcctgcacttttaccagaaggtggtaaaagtaagagaagaataaaattttggacatgtaaaattcatgtcttctatagagtaactgggtaaagatatccatcagactgttatatatgctcttcaggagctcaagtagggattgtattgcaaatgagtaatttgatatttatcagtgtacaatgatgactgaaaccattatagccattgcagtgtggtgtgataattcactgatgctatgcggaacaggatatcaagcaggttttggggacaagtaccagttaagaaacaagcaaagaaaagaattcataagtggaaaattgtttttaagtgataattataattagcatcatgagaaaacaatatgatgaagccaaggaaaatatttaagatgtctttttataaaagagccatgatgagcagattttaactttgcctctcataaaaccaattaaaaaaacttaattttcaaaggaatgtaaaaataagggaaaatatcttaatttgggatagaaataagaaattgaggcatccacatatcccatattttgaggactttcttacagaaacaatacacgtaagatgagacggaaatcaccaagacttgggtcatgagtttctgaggaagaaatgaggcaaacgttaattcaacgtttaatggtgacaatcattgctctgagcaacttaacaactctttaattctcaaaaaactttcatctatgtgtttagcctcacttttaggtcataaaactgaggaactgacaatttcagtaactataatttgcgcatgtcacacagaaagtagtggaatgagaattgaaatctacatcttataacctctaaaatatttgcttttaacctctacactgttagaagtaactaactggacacatggacagaatagttgtgtgtttgttttctcctcagatgtggagaatcatgtaagtaaaggaatgaggcagtaaagaaagaactgtgtaatatatttaagtgtaagtattaactagtggggaagggttctagaagtcataggaaagatgggatgaaaaacagaaaagacattatatttaagaggaggaacatctcattttttgagaccagagtaaagaagatatggagagggctgtggaccacaagtttaaaactttgccaaagtattttacttcgtgtccatgaaaatcttttattttcctctgagaaattaataggcttttttatgaaagacagtgcaaactatataatgaattttgttaattttagttttatgtcctaatttgtttttcctatgaaggccagattcaaatttgaagcttaattcttaatgaacttatttctgtatatttctaattgaaagtttctccttaatcacttatgttttcctaattttgatccacttagggttttccatcttttgttgagattattgttatctacttttcctgccttatagaataagataataaaataaatacatcatttaaaactcacgtaggacttcatcatttcttcttcctgggagacagcagaatcctgagatggccaaggtaggggatgggtgaaaaaataagccatcaaaaaccccacttgcttagcagctctaggaaaggcagactaggaatctccagttagttaagatcatctggaggaactttgtggggaaataatcttaaagtctatcaaaaagccaagaataactacactgtttgcaggcaccaatatgtacaagcatgactgacgaaatcctatggagcttcaatatggatttttaaacattatttctaaattaaaagtataattcagaagatatttttaagctagctgcatacttcactcttcgatctatccatccatccatccatccaatcacaaacttacagaaagttgcaagtatagcaccaggaactttcttgttactgaaccatttgaaagtaaattgttgacctaatgctacatcacccctgaaacaggaattaaaagaaattaaagagtgtgtaagcaaaaactcaattgtatgtgagaaaacccaattccccctgagaaacagaaagagctggagtcctttaaaaaattaactgcctgtttttctgtggctagtgagctttatctctccctttcccaggcattgtgaagacccggtttccctagctgtgcagctgcaaggtcactagacagataaactcaagtcgcaaaacatgtttttccttgaaaagtaagaaatgatgtaatgcatgtctcacttgcataagtgcctttgtttctcgcttctgtagtatgcttccccctgcatagatctcccccctcccccgcctacccccacccgacgaaatgcctaaaaggtaatttaactctttgttcagggctcagtcctttagatgttaatccgactgtgcagttaaataattaataaatatcatatcctcctgaaccccatcagtcgctctaattccttaaagatcccacaacatccctcaaaatgctgcatatttcctacaaaaaggacatgcccctacctacataaccacaatccaattaccaaaataaagaaattaacatttatttgttatgaccatcgatatcagattcaagtgttgccaattgtgccattaactggatagcatgaaaggaacaaatttagaatcatgcattgcctttagatgtcatgtctctttaatctcctttagtctgatacagtttctcagtcttgcccttttataaccttgacactttttattattataagccagtctgaagaatttccttccaatttggttttctctgatgtttcctcatgataaggttccgagttgtagaaagaatgccacaaaagtgatgcatgctcctatcaggggcacatgatgacattctatcctattactggtaatactccttgatgaaagagcattacatcttaatcactaagatataccagccaggcttctctactgtaaaattactctttttttcctttgtaattagtaaagattttatggggaggtactctgagactatgtaaacacaccattcttcatcaaactttcaatttattaatttatgtcagtatagacttgtgatttcctatttcattcagaggtttgtaatctattattacttattttaatgaccagtttgctccagatttggcaagtgggagcccctcctgtgtgggttttgcggcctttaacaggttcctatcattctttgagcgccccttacttacacatataaaagatgttccaggctcatcttgtatttgctgtgcccaacactggaatcaatcatttcttcaaagaacgcagatttttatcagaggaaataataatagtagtaaaatatatattttatgtgtgtatttatgtatatgaaacatatttgatcagtcccccctagaagaagccactatcccattactgccgccatactctccctggatagatacctcctcattgtgctcaagctacagtgcagtgctttaggcctaagtaactgcaccggcatgtatgcctagcttgctcagcccctaatggatttaggattacagtattaggaagagaagggaaaatgaagaatctttcctgttggggtgatcagacccaacaccaggtcgtgggggtgacaaagtccggcggagtcaaaggattgagaaaaagacagtttgagagagaaaagtgggaccggacccagggggccatcacaatcgtagaggctgcgaaggcccgagctctgggagcccatgctatttattggtaatccaacaaagaaacaggtggtgagaatgtggaggtcaaaagggcacattgcattaagtacatgatttacagctgtgatggtttagcatttgctctacttgagataatggagagcagattcttttaactcaagatacaatcaatcctgggagagcaaggagcaaggagccagcaagtctagatacattccagagccatgagccctggattctatccaagccacaagggattttatgccctgggcttagattatggtgcatgatggtaggcttccaccctttagcatagagcttggtgttccaaaggccacaaggggttttagaccctggaccccggacatgttccaagactcttttacattatgtcagacatgcaagccctgcctcagcttctcctaaccctcagctttttcccaacactttcccagctggatcagagagatgcaatgtttgaaggacttgaccctctattgctggcttttgagatggaggaagggggccgtgagccaaggaatgtggcagcctcttgaagctgggaatggcccttggcttacagccagcaagcaaatggagacattggacttacagatgcaagaaactgaattctgcctattaacctaaatgagtaggaagcagattctccctagagcctctagaaaataatgcagcattgctgccactttaaatttagttcagtgaggtctgaacttcttgacctacagaactaaaagctaataaatttgtgttgttttaagtcactaaatttgtggtaatttgatacaagaaaatactcgtacagtggtcacttaattttcaataaaggtgccaaagacctccactgttgaaaataccatttgcattttcaataaatggcactagaacaacttgatatccatacagaaaaagaaataaatgaacttcaacccctacctgccaccatgaacaaaaattaacataaatcctagaactaatataaaaagctacaactctaaggcttctagaaagaataaatatgtaaacatatttccaacctggcagtagacaatttgttaagtcacagaaagcaaaactgcaaaagaaaaagaattgacaaatgttatcaaaaatgtttttcttactcatcaaaagacactgttaaaaatatgactaagaacatttataactcggccaggcgcggcggctcacgcctgtaatcccagcactttgggaggctgcggcgggtggatcacctaaggtcaggagttcgagaccagcctgaccaatatggtgaaaccccgtctctactaaaaatacaaaaattagctgggcatagtggcatgcgcctgtagtcccagctactcaggaggctgagacaggataattgctttaacccgggaggcagaggttgcagtgagccgagattgcactccagcctgggtgacagagcaagagtctgtctcaaaaaaaaaaagaacttctataactcaacaataaaaagatgaacaaaccaattaaagatgggcaaaaattttgaccagatacttcacaaagaaagatgttttgccaataagtacataaaaagtgatcaacatcattagtcattagaaaaatgtaaattaaaaatactgtgggacagtaatgagatatatagccagaaagacagcaccaaatgttggcaaagaggtagggagactgaaactctcatactttgttaatgggagtgtaaaatggtgcaatccctttgggtatggtttgacagtttcttataaaactgaacatacacctatacactgtgtctgaacaattccattcctaggtgttaccccagagaaatgaaaacagatgttcataaacagacatgtccaagaatgtttatgacactattattcataatagccaaaaacttggaaatagcacaaaagttcaacaagaatatgaataaactgtgatacaatcatagagtggaatacaactcagcaataagaactattgagtataccacaaacacccacacatacaacatggatacatttttaaaacattatactgagtgaaagaagccttacatacaaaaaacacatatttcaatcccaattatacgaagttctagaagagacaaaaattaatctacaatgggaaaatatcagaatggcagttgtttctggatatagagtgggaaatgactaggaaggagcatgaaggaactttctagggtgatggtatttttcttcactttgacaggattttggtttgcacaagtatttgaatctgtcaaaattcttcaaatggtaaatttaagattacacaattttactgtatgtacattttacctaaaaagctgtaactagatattgaactttagttagtggtatgcatgctaaagtatttaggggtaaagtatacgatgtctacaactaactttgaaatacaacaaaaaatggatcaattcatccttatggatgaatacagggctggatacaaggctaattatttggtaaagcaaatacagcatgatattcattatagtacttagatagcgaatgtatgggtatttttgtacaattcttttaatttctacatgtttggaaattttcataaaatggtgaaaatacaaaactatcaacttataattctacattcagcaaaaatatctttcaagaattagaagtttttagacaaataaagacagaagttttcaacaatagatcctcactgaagaaaactgtgatagatgcacttcaggtagaagaaaagtgatgcaagaaggagaggtaagcaaagaaagcagtaaactggtgtgtaatcaaacactcagctcataaaacataataatgtctccatatgtgtgtgtacattattttggtgcttatgtttacaatataatttagcaggatatacttaagttatcaaagtctaaatagtatttttatttcctgccaatgacattggcatacttcaacactaatcacttctaccaacttaaaagctattgctgtggtatttttaaaatatatattagtgtgtgtgtgtatatatatatatacacttacacacacacatacatatagatatataaccagattataccacaaagatagcatgtaggttggtagaaacaatgcttggtgctaaagtattctaacatcattattttgctgggcaggaaaaatgttttgttcacacattgataacttaagtatgtcctgttaaatattttgcaaaagtactaaaataatataaatagaatgcatattaccccaaagagtagcagaaaaggttggggagggggaaccaaactgaagaaagaataaaggaaagaaatgaaacattaaagttacatatacatcacatcacaaaataaaatcatagaaataaatacaaatggccgggcgcggtggctcatgcctgtaatcccagcactttgggaggctgaggcgggcggatcacctgaggtcagcagttcaagaccagcctgaccaacatggagaaaccctgtctctactaaaaatacaaaaattagctaggcgtgatggtggactcctgtaatcccagctactcgggaggctgaggcaggagaattgcttgaacccaggaggcagaggttgtggtgagccaagattgtgccattgcactccagcctgggcaacaagagtgaaactctgtctcaaaataaataaataaataaataaataaaaatatgccagtacatctctgattggataaataagtaaaatgtaactaaaatctgttttcaagaagtatattaagggaagcatatagaaagactgaaaatgaagaacagaaaaaacatttggaaaatactaatcaaatgaaagctagtgttgtgatattagtgtcagataaaacagactagagcattattataaagtgatcactaactgcatcatgatgaaatgttcaattttccatgaagatataaaaattgcaagcttaagttactaaaaatacacactataaaccaaaaattaatgaaactacaaggaaaaataaccttacagatatggcgagatattatacatagttcttttagtaaatgatagataaaagagatacaatcagtaagattatagatttcaacaaaaattacaactttatttaatggctatgtatttttaaaacagttactattatacacaatagctgcaaaagacaaattctcatcaaagacacactgaatatttagaaaacttagacacgtattagcctatcgggcaaatctcgaaaactttcaaaggactagttttatataccgtactttcactgcccacaaaagtagctatgtttgatatatgtcatcaaaggaaaattagaaagacctatatagttaagaaatataattctaaattatttatggttaaaagaaatcatagtagaaatttaaaagtatttaaaactgaatgatgagattactacttaatatactgatgctcctggactcaatggggttatgccctaataaacccatcacaagttgaaaatatcattaagtcaaaaatgcttttacctaacctaccaagcatgacagcttagcataacctactttaaacatgatcagaacacttatattacctaccagttagatgaaatcatctaacacaaaccctattttataattaagtgctgaatgtcttaatttattgaatactgaactaaaagtgaaaaacagtattgtcgtatggatatttgaaatacgtttctactgaatccatatggcttttacaccatcataaagttaaaaaaatcatagaaccattgtaagttggagactgactgtatataaaattctgtaggatgcagctaaagttggacctcgaggaaaagttataaccttaccagtttatattagaagtgtaaaaattgataatatctagcatccagcttaaaaatgtgagaaaacaatggcagaataaatccaaggaaagtgaaagcaaggaaataataaagaccaaaacaatacaagaaatagaaaaatagttatattatggagaggattaataaagtctcaaatagatttttgtgttatatcccaaaaattattataaaactgctacagcatggaaatagcacagggaacaaattgaccaatataattgaataatgaattcccaacatatgtgacacatacatatgtgttgtatgtcccatacacatataataatccaatttatgactactgataagtgaaaaagttggtctttgcatattctgggacaactggtatatgcacacatacataacacagaaattgtatctctcctttaacttactacagagatgaattctaagagattttataaaaaaaattgtgaaaggcaaaactataaacctttaagaagataatatatgaagctaaatttatgactttgatatagagaaggatttcttaaaatgcaagaaagtacaagccatagagaaaaaaattcataaatctgacattaaaacagagaatttctatttgttaaaagatccctattgtaaacaaagacaagctataaactgggatattttcaacacatatagttgatacagaataaacatccaaaatatttttacaaagtcctataataataaaaagacaacccaaagaaattgagcaaagggtttcagtaggcatttcacagaagaggaagggccaataaacaagtctttaaaatcttaaccttattagtaagcagagaaatgcaaattaaaaccaaaatgagattctactgcatatacatctaccagaatcacctgaacttaaaattctgagcatttcaaatgttagtaaagagtatacattggaaaatcccctttggaaaatattgcatattgcctagtaaagttgagaatatttgcatggtatatgtactctgtgttcagtaatatattcttcatatatatcctagaacagggcttagcaaactatggcccacaggctagatcctgccttggcataaagtttcactagaacacactcgttcttttacatattgtctatggctgtgatttcatgatacaatggcagagttgagtagttgtgacagaaactgtatggcccgcaaagcctaaaatatttcctatatgtccctttgcacaagaaagtttgatgacccttgccctagaacagcctctgcatgtccatcagtaaacatgtacaagaatgttcgtaatagaactataaattcaaactttgaagcaactcacatttctatcaactgagaatggattttaaaaactgtaatatagtcaagcaatggaatactgtaccataaaaatgaatggattatagctacactacttaatctcaggaacataatgttgacaaaaaagcgagtcacagaatgatatatgaaatagttatataaaactcaaaaacatccataaacaacatagttttggagtaagtagctgaaactataaagaaaagcaagagaattataaacataaatctcaggataattgttatgtctgaaggaaaaggggatagaaatgggaatagatgtctaggagtcttcaaagttagtagttaatattttcttttggctgggcgtggtggctcacgcctgtaatctcaacactttgggaggccgaggcaggtggatcacctgaggtcaggagttcgataccagcctggccaacaaggtgaaaccccatctctactgaaaatacaaaaattagctgggcatggtggtgcgcacctgtagtcccagctactcgggaggctgaggcaggagaatcgcttgaacccaagaggcggaggttgcagtgagctgagatcctgccactgcactccagcctgggcaacagagtgagactccatctcaaaaaaataaatattttctttcttaaaaaaggtagttggtacacaggtttttgctgtattgagaattaaaaaaatacatatacttcataaatattattttgtatctactctatatttaatagaaactatctttgaaacatacgaatttaattaaaagacagggtgaaggttaaattcttttggtaggtcataataaagtagactcaatttcctccaatggactggagcctctaaggcaaatactcgaataacattgtaaaatatgatttctgttgactgaaaaactgggcttgaaaaaccaacggtttcattctacctgattcttcctccctcaccaagactctttcatttcttttttaaccatatctttctttcccattatctgataaggaaattataatgggcttaaaaacttagaaaccatcttgcatatcgtaaaagataagaaattggtcagactctggctgtggaattaagacccatttccatggttgtcagggaagcaaggccatcctaggaagggctaaagaaagctacaatcagagttgcctccacacgattctgcaaagctctaattattttctgagaacaagggacaaaaattcaggcaagcacacagaatccacaggattcacaaaggaagaagatactccagattgtaaattttaatttgggggagaagatgtccttccctagccagatagattcttctagtttccaatataaaatctgtaaataatctctctgaattcagttatctctactccttttaggaaaagtcttgaaggtcactggccactgcaatgaaaaattgttaatcacacaaagccagggtcaagattcatgacatagatggccattgtgaatgaggaactattcatatatatttcaggattctcaatccaacaacagtagaatggttaaaaaggattatgatgatcaatagacactatgtaatctttaatatgttccaattaaaatacatcatattaacaaattttaattttgtaatattcaaaatgttttctgtcattatttcaaaatactaatgatgtctttttaaatattatgaacatttaaaaggtatatgcattttattgcaatattttgttttaaaacatgaaaaaaacagattacaaaatagtatgtagtaagtgatgtttttgatatgactgtacaaatatttaatggcatttgaaaagatatgtgtttatcttttgattgtgataccactggtggttttaaaagttttcttttcctagggctggccagggtggctcatgcttataatcccagtactttgggaggctgagggaggttgacttgaccctaggagttcaaggttaccatgagccatgattacaccactgcactccagcctgggtgacagagcgagaccccatctctttaaaaaagaaaaatgtcactgacataatactgcgtaaaattttaagattcattttgttaatttaaaatttataatcctaagtttattggatgcataacattctgctccctgtgtactataaattacttaactatttctttgttgagaatatacattgaaaagatcatctcaaaaattctcctcacaaagtggctaattccaagtctgggacagggaatgcacaatataagtacgaaatatctgtgccaggttgggcgtggtggttcacacctgtaatcccaacactttgggaggcctaggcgggtggatcacttgagatcaggagtttgaggccagcctggccaacatggtgaaaccctgtctctactaaaaatataaaaaaattagccgggcatggtgacaggtgcctctaatcccagctacttgggaggctgagacaggagaactgcctgacccgggaggtggaggttgcagtgagccgagccgagatcatgccactgtactgcagtcttggcgacagagcgagactctgcctgaaaaaagaaaaaaaaaaaaaaagaaaagaaaagaaagaaagaaaaaggaaaaaaaagaaatacctgtgtcaaaaagtaaggaagtgctcaaagacaaatggggacacgggcaccagcgtcaggggttcttacaggccaatttggaacaatttgagcaacacagaggatgataacaggctaaagtactttggacaaaaaataaaaatccatgagccatagtgatattcaaaagagaaaaaataaagaggtatagagggaaagggtggaaaggcaaagctcttttatatacaagaaggaatggtaaaattaaaaatcaccattttgcaactcctaacttaataactgatttagacaagaatcattaatgattattaaaaccatcaggtaaaaggctatttgggaaatggtttcaaaatatccccatcagattacttcttagcctcaaagaaaaaaaggtatttttttaccatgaagaaatcaggtgcacatctccttgaaccaaagtaataaaatttagtatcattggtaatggatcaaactgaaattatgtgtcacttaatatgatgcaataggaagaacacaccagcattcatagttttcttgccaaatatatttaaacttaacctaattatgacagagcaatcaaacaaatccagaatgttaggcattctacaagacaaatattctggacccttcaactcttaaaaaatgtcatgaaatacaaaaacaggctgggggaatgctgttctagattaaagaaattaaaaagataggcccacctactgtaatgtgtgaccttaattgggaccaggatggatattttaaatacacatatcagacatttgggaaacactagggcaatttaaatgtggactatatattagataatattatgaatcattgttaaaatttatatgtatattcatgatatcgaggttatgcaggagaacaaccttgttcttcgagatgcgtgctgaaatcctcaatggtgaaatatataatatctgcagcttacccataaatggtgaacaaaaaataaacaaaaatatgtaaatacatgcagacagagattaagcaaatggtccaaaatgttaaaaactggtgaatctaagtaaaggatacacagtgcaaatcattattcttttaattttcctgtagctttaacatttttcaaaataaacacttagggaaaagtaattatatcagagtgcctcagatacttttttgggattgctgattaaatgctagactcatacgtactggcataaacctaatctgttggaagaagttcaaaatcatttgccaacatcaacaaagactctcaaagaaaataatccagtgccaggaaagagaacatacttaccaatgctgtccagggtcagacactataacggagctgaatccagtaactgggctgaagagataactaatccttaaaggtcagcaaggtcaaaatgggttataaggacataaatatgaaactggcatttcataaacaaacaagacacctcaggcctatgaaaacttgttgccttactattcccttctctctgcagtcttcctaaggtgtaagtttttctggattttgtctgcttccacagtttaggttccttggctcacttccttgctccaaaaccaacgtctctattgacttttatattttaaaattaaattttaaatatatgagtgatgctaccttgctaaaagagagagagaggccgggcgcggtagctcacgtctgtcatcccagcactttgggaggccaaggtgggcaaatcacgaggtcaggagttcgagaccagcctggctaaaatggtgaaaccctgtctccactaaaaatacaaaaaattagctgggcgtagtggcaggcgcctgtaatcccagctactcgggaggctgaggcaggagaatcacttgaacccgggaagcggaggttgcagtgagctgagagcgcaccactgcactccagcccgggcgacagagtgagactctgtctcaaaacaaaaacaaaaacaaaaacaaacaaacaaacaaaaacagagagagagggagagaaatgacctataatgcttaagttccctttgacatttacttctccccctttaccctaaatcctctcttctctccctaaaggttaccattagcaggagttttgtgtgtatccctctataaaatatatactatttttatactaattatatcacatagtattctaacaaatccttctcagttcctgcagtctacgtttctgatggtcttaaccttttttagcttaaagtacctctttgtgaatctgaaaagctgcctatactttttttaaaaaaatcacatatcaacacatataaaatgtcataagtttaatatacaagaagcccatccacatggaatctattcatctcaggtgaacaactgttttttacttttaagtgatagcttcctttttcttgcaagcactcatcgtaactattcaaaagccaaaagtagtgacccagaatcacacagatgcggctcaagatcaatgcatgctgttcaatttgaaaccagaatgtgtctgtcacctcctaaaaaaaaaaacaaaacccagtatatatctcccatatataattggacataattcttttttatttttatttttatttatttattatactttaagttctagggtacatgtgcacaacgtgcaggtttgttacatatgtatacatgtgccatgttggtgtgctgcacctgttaactcatcatttacattagatatatctcctaatgctacccctccccctacccccactccctgacaggccccagtgtgtgatgttccttaccctgtgtccaagtgttctcattgttcaattcccacctatgagtgagaacatgtggtgtttggttttctgtccttgcgatagtttgctaagaatgatggtttccagctttatccatgtccctataaaggacatgaactcatccttttttatggctgcatagtattccatgatgtatatgtgccacattttcttaatccagtctatcattgatggacatttgggttggttccaagtctttgctatcgtgaatagtgccgcaataaacatacgtgtgcatgtgaattggacataattcttgcctgactttgacccactctaactcagtgcaatttaattatctatatttcacatagctatgcctgatcacacacacaggttcattccctcaagaattctgatcaccaaatttgctattccagtcacattaccggtaagagatcaatgtatttgatatatggtcttgcaagaccaagttttattaatttttttccctctgaaggagtggtgaaattatactctatcttctctgtgctggaagttcacaagtttttgattattcaaaaatcataaaaggccaagaggtcttgaagtaagtaaaaataagttcaggtttaccaacaaactctacagccttaagttactttctgccggccaaggttttctcatcagaaaatgaggacaagtgtttgacctagaatttgggaaatctgactagtgctgtactgtgctaaaattcactcttcttatgtataacgttgttttattattttattagttgatggcctctcaaccgtacccagtaataagagaaactttaccctctaattagaaaataatggatatctacttttggcctgctgtggcagaggaaaaggcagttaccctaggactggttttgaaataatctttctaaaaacaaagaaaaaactacgttaattttggattcttcccgataacacatatatttgatccaatagaaaaatgatgtctaaattacttgtcagataaattgattatcttttccagattattacattactatttaaggaagaaataacttggccatagtattttcactgtcacacacgatcacacacagctcatttgctcttggcacccttacagacactgaaatacaagcacaaagaaagcacgtttatataacacagatcaccagttactcaattacggccacacacaaaaaagcagatatacatacagatacccttcataagcaaaccacaatagagatctgtgtaaaatcgtcttactctgttagacgattctacacagttataaaatcccattactacgcagcttaaagtacaaatcacctcacaccccacagcaggaagaatcacacacaggcagaaacacaaccatacacacccggccacggaaagactctcagtccacctggcatctcccattgtcacacacaccccaagggcctgggagggcacacacagggtcctctgcaaatccgaggttccggcgggtccccgcaccggccccagctcctcccccgcacctgcctggccggcgggtcccaccctctctcctgccaggggtagaccctgggaccactcagctcgctctcgcaggccctgagcgtctgacgcctgcgcactgagcgcgggcgggcgggcactcccagaaacctccggggcgctgcaggcgggacaagcaggttccacaggccgagcccacgagcccctcgaggggtgagcggcccgggcctcctggcgttctggccggctagccaagcgctggactacatttcccagaggcacggcgtccggagcgctggactacatttcccagaggcaccgctcccggagcgtagcttcatttccgttagtttgcgagatttggaggcctcgcgtggggagagggccgcgtctgtggaggagcttggctccgcacctgctgggctggcgaacccgaaattgggcttggaacccgggagccagatcttggaccctgaactgcacctctgtcaaggtaggagtgtccgggatgccggagcggacacgcgcggagaaagcgtcgctggggttactcgtgtggccgtgtctccggttttgtgtgcaggctacagcctgcctggtattggcgactgcctgtgcatacacgactggacgtgtgtggctgtggttttgtgtatgagcatttgtatgagtgtgagttgtgactctgagggtgtttgtgactgtttgcttacctggctgggatatacttatgtgactgtgattttatgtgtgccgcgtgtataattggggtttgcctgtgactatgaagtgtgtgacagttgtgacaagagtgtttggatgttcttgtgtcactttgaggttgtgtgtaaacctgatatcgtgggatggatttgccagtaaatttaaggtgtgtgacagtgttgctgtgacacggtgtttattaccgcgtgtttccctgatttcgtactgggttgggtgactgtctgattgtgtgtgactgtggggttgtgtgtgctgttttcatgactgtgtaaagagactaaaattgcagctttgaaagggtgtttttggcggtatgtgtctctgacaaggtgcttggatgtaattatatgccttgtacttaatgggattttgtttgagacaaggtggtctaacaatgtagcataattgggtgattgtgcctctagctgtgtaactgtggaaatgtgattatgtgtgactttatgtggccatttgtatattctgtgaccttatgggggtttagtccagtacagaagtaaatttctttttggtatttctggggttcatttggggctgaggtctgcctatggattgtgagtcccatgtggctctgtgctcctcccatgtggctctgaggacttaaggactttttgatttgaccacagtggctgccctttcatccatggcctgtattgcttcatttctgtatccatcctcggttcaccttgggaaatgtagttacttacgagttcacgacttcttccctgcgtcctcttgccttatagccttaaggggattgggtgcagggaagtggcaagaagtaaggaagtcagacatttggacacctgagtgatgaataggagttatttgcaagttacagacctggtcttaggatgagaattttagggctgataataccttcaagacagccactggatgctgtgcgcggtggctcacatctgtaatcccagcgctttgggaggcagaggcgggtggattacctgaggtcatggtttcaccatgacctctactaaaaatacaaaattagctgggcgtggtggcgcatgcctgtaatcccagctacttaggaggctgaggcaggagaattgcttgaacccgggaggcggaggttgcagtgagccaagatcaagccactgcactccagcctgggcaacaagagtgaaactcattctctaaataaataaataaataggccactggaaatataatgggactccaggagtgggaatagtttcagagggagtgctttaggagacagccacccagttctgaacctgaagcaccccactgcaggactgtctccagtgtacagctttgaatacagaaataaattcaagcccaagacagctgtgacctggcccttctttctgatacagaaggtagaagacttattctagtctcctcctgacttttctttatgttaaatgagattaagaggatggaggaagagggtatgttataatttagcatattccccaagaaaggcctaatatctcattccatttttctttttctgagagtagagcccagaggagaaagaatggctgtttcagtagcaatgtccaaggtgagtatttcctctttgtttcctgaaatacctttgttattacaggacatagacatttttgttttctttttgaaatttcttgccttctcaaatgatagaggggcaaggcaatttttggtagattgagagcaaagaaaatgtgccattaatcgggatagatgcttccccaatagtggttaaatttacgaagaatggatttgagactcatggatttaaaaaggggaagagagaaatagctctattgtgttatttaaaaagggaaagagctctattgtgttatttctgatacagcaccattttgattttttaactttttttagcttgttatggaaagtttcaaatgtacacaaaagtataatgaatatgcctagcttaaaaacgatcacggccaggtgtggtggctcatgcctataatcccagcactttgggaggccgaggcggatggaacgaggttaggagatcgaaaccatcctggaaaaaggtgaaaccccgtctgtactaaaaattaaaaaaaaaaaattagttgggcgtggtggtggatgcacatagtcccagctactcgggagactgaggcaggagaatggcgtgaacctgggaggcagagcttgcagtgagccgagattgcgccactgcactccagcctgggcaacagagcgagactctgtctcaaaaaaaaaaaaaaaaaagcgattactttccaatcttgtttcatttattctaccttcagttcaaaatcctttctaatttgcccctttgatttcttgacttataggttattttgatgtgtcatgttttcaaatattttgaggatcttccagagatcttttgttactgatttctaatttcattacattgtgttcacagaatatacttcatatgattttaatccttttaaatttattaagatttgttttatgacccagaatttgatgcatcttagtaaatgttccatgtgcacttgaaaagactatattctgtggttgttgggtggagtgttctataaatgtcaactaggtcaggtaggttgatagtattttttaaatcttccatatctttactgagtttttatttgttggatttttctccttgtagtttctttcagtttctgcttcatgtattttttttttttttgaggcagagtcttgctttgtcacccaggctggagtgcagtggcccaatcttggctcactgcaacctccacctcccaggttcaagcaacctccacctcccaggttcaagtgattctcctaccttagcctcccgagtagctgggaatacaggcgggcacgaccatgcccagctaatttttgtatttttttttttttttttttttttttagcagagatggggtttcaccatattggccaggctggtctcaaacttctgacctcaggtgatctgcccacctcggcctcccaaagtgcagggattacaggtgtgagccactgtgcctggcctgcttcatgtattttgatgctctgttattaggtatagaaaggttttagatttttacatcctactggtgaattgacccctttatcattaggaaatggtcttccttgtccctcataatattctttgctccaaacatctactttgcttgatatttaatgtagccattccagctttcttttcattaatattagcattgtgtgtctttttctatcctttttcttttaacctgtttgtgtttggtatttcaagtgcatttcttacaggcagcatgtaattgggtttgtgtttttattcaatttggcaatctccattttttgttgttgttgttactgttgttgagacagagtctcactctgtcacccaggctggagtgcagtggtgtgatctcagctcactgcaacctctgcctcctgtgttcaagtgattctcctgcctcagcctcccaagtagctgggattacaggcacacaccaccacacccacctaatgtttttgtacttttagtagagacggggttttgccatgttggccaggctggtctcaaactcctgaactcaggtgatctgcctgcctcggcctcccaaatttctgggattacaggtgtgaacaaccacacccaaccagcaatctctatcttttaattggagtatttagtccatttatatttagtgtgattattgatatggtttggttcaaatccatcattttgccatttgttttatatttatcccatctgttctttatttcctgttctcccttttctgccttcttttggattgagacagagtttcaaaataacaataccaatattttaaccaaccatatgaatatagaaaaacaacataaagtcctgttggagtttgacaggatatagcccactagggatctataatcaaattactgtgtttaaaagtcgtctacaataacacttctcgtatggttaagctgccagctggaaatgcagttatgctcatttgttttatattgcttttcatgtttagggattgcttttctcccactatgatttaattttgttttaaaattacataacatatatctaaaatcaaaagtacagaataagatgaatttgaagaagtctagtgtccatttctgtcccctctacctgctcctttcttccctctatagtagctggggctacaggcacgcgccaccatgcccagctaattttttgtattttagtagagacagggtttcaccatgttggccaggatggtctcgatctcctgaccttgtgatccgcccacctctgcctcccaaagtgctgggattacaggcgtgagccaccatgcctggccccgtttttgctttttttttttttttattttagtaatccatcatacatagtgatgtgcacttctctgaagtagggcatagtatctggttgttttcctttatgtgatgttaacagccagctactgacatctttatgtgaatatgttattttatcagtggttacagaattatattctaattcttctgcatttattagctggactatatctataaagggagccatcctttctcaatgtcttggttacctgaagaatagtttatgcaaaaagaaaaactggaatgaaagattggtttttctcttattatttttcagcatctttcaaagcttattctgtgtttttcttttaaactattattattaacttgtgtattaaaacatatctgttatgtttcgatctgtgacaataactgttcttattaatgctcacattgttccatgtatggcaagtggaaggtttaccctctctgatttgtctgcttttggattcctttttattctttttgacatgaccccagtagtctttggcagattccagactttccgtgctgacagagtattccaggctcattttgtacaatttcctgtcccaaacataaaatcagccacttctttatggagccctggttccttttataagaagtgcttttaagaagtcacaacaaggatagtaggaactctcattgctcctagttgtcattgcttatagccttaacagagctggtgaaatacaaattttttagaaggagaaaaaaaatcctgagtgtatactgatatttccaattgaaataaaagattatagagtttttcttactatctttgattttatatttgtgttttataatctgaaaaaatcttaattcgtaatgattaatgatattaagattctcactgatatatgtgtgtgtataatcatttcaggttatatacatatattacttttagactaacaatgccaatattattaataacagtataactactgaaaaactctaagacataacttcataaagttataaactcttaagacaactttgaaaaacagtttatagttattttgtttgtaggttatattgggtctaatgtcaaatgactgtattttaaagttcccgaaaataatcacttcctttatatgtttaaccttccagctttatgcacagataagtttgtttcattttgcttttatttcttagagattttttttcattttgatttaattttgtgattatagttatagaaaacatacttgtggttccaaagtcaaatagatttgattggtaatactttataactttgttgtatgtctgtcttcctagaagctattgagctgtaacttttttcatgtaatatctttgtgaggttttagtattatggttatttggcctcaaaatgtagaacagactgctgtctcctttttctgttttctgaaaacgtttgtgaaagaacagtattatatctgccttaaatattggtagaatttaccagtaaagccatctgggccttctctgtggacagtttatttgtttgtttctcacattcaatttctttaatatccatgggatgatttgtatttctgttttttcttgtgtgaattttggcaatttttgttttaaggaatttgtctatattgttgaaattgccaaaattattggcatagaattgtattatctttttaattaaagccttaaaaaatctgtggtccagtctccactttggtaatatttttttttgaaaacttgataggggtttgtaaactgtattaatcttttgaaagaattgatttttgagtttgttgatattctctattgtaatctactttatattgtggattttgtgcttatttttattctttcttttcttcttactttcagcttcacttgctcttctttttccagcttcctaaggtgggagcctaaatcatttttctaacataagcatttaacactattaattttcctctaaatactgcttttgttgcagctcacagaatctgataagtgtgtttccattgtcactcagttcggcatatttttcaatgtctttttgcatgggttatttagaagtatgtttaatttccaaatatttggagattcttgttactagtttgtaatttaataatatgtggacactgaccacagtatattctctgtataattcagtttttaaaatatttactgttacttgttttatgacccagcatctggtttattttgatgacctttccatacgcagttgttaatgaagagtctgactcttgctaaaatcctatgtgtgggttctcaggctccaccaggtcattcctggcaggccacacaggggaaaggtggcctccccgcagcagacttggtgcacttctagtgcattacagtctctaaagggagttgcagtgcaggactcaggcctcccagaccagccatgctgttatgcgtgtttacattcctaacccaggcacctccattaggaggcctctttatcaggtgcctctgccaagaggacatcctaatctaggggagaggggaaactttgaagacactttctttccccactcttagtatccggtagttttaatttttttctttatttcttttttctttcttctcttttctttttttttaacatatttttggagacaggatattgctctgtcgcccagactggagtgtagtggcatgatcatagctcattgcagccttgaactcctggacagttcaagcaatcctcctgcctcagcctcccaagtagctaggactacaggtttgcatcacaatgcctggctgatgttttattattattattattattattattattattattattattattttgtagagacagattcttgctatgttgcccaggctggtctcaaacttctggcctcaagtaatcttcctgcctcggcctccccaagtgctggggttgcttacaggcatgagccaccgtgcccagccaggcctcactactttttcactcttagcccttcccttgtcttcttgtcccctggtcccagtccataaaatgaatgataggagctttttgttctgcattcccttagcagtgagatgactcacttctgcactgatccacatttgcactgatctgcctgaccctctctgaccctctccaggtgctatttcatggttggggttgggggagtgaaacagtggagtactcagcgctttctctgggttagcctcttaaattaagtgactactaagtgattaaaggctggttgtgttaatcacttattccaacaccttgcagctcagttctcttcagcccagcttggcttttggtaagtgggtgtggtattctattaatatatatttatcatcttggccaaggtacttgatatagtggtatgtaaatcctctatattgttatcgattttattgtctacttgttctgtcagttactgagcaaaagattttacaattcccaactctgtgggtttgtctctttcttcctttagtactgtcaatttttgcttcacacattttgaagctttgttgttaaatctctacatttggattgctgtcttcttgatgagttgatcctccttattgctagtatttctctttatcttgaagtctattttgtcttatactaatataggcatacaagctttcttgtgattagagtttgatggtgtatcttcccattttacttttagcccatctttatatttaaaatgtgcttcttgtaaagagcatgtagttggaacatgcatttttatcttgtcttgttaccatttttttattggaatggttgaactattattaatacaatttagtttaagctctgccatagatgggagcatccatatgtggctcttaagaagagcttagggccacatgtggtggcttatacctataatcccatcactttgggaggctgaggcaggaggattgcttgaggccaggagttcaagaccagcctgggcaatgtagcaaaacctcatcccaacaaaaaaagtaaaaattaggtgagtatgatggcacatgcctgcagtcctagctacttcgaaggctgaggagggaggattacttgagcctaggagttcaaggttacagtaagctatgatcataccactgcactccagcttggttgagagtgagaccctgtctcaaaaaaaaaaataaataaataaataaataaataaataaataaataaataaataaaaattaagagcttggcacttttttggagtttaggtcttttaaatttgtgccctcagctctctgatgaatttaaaagaaattatgacttttcatcttatctgaattatttttaggttgttaggatgggcccaagtatctcttgcagaaatctatatgttgaagaagtcaaattttcagttaaaaatgtattgagcacctgtatcaatgattctctgcaggggcagttattctccctagagggtgttttggaaatatatctaggtactgttgaatgttaaagtaagtgggttgagggtaaagacttctagcttttttgtttgtttgtttgagacagagtctcactctgtcgcccaggctggagtgcagtggcgcgatctcggctcgctgcaagctccgcctcccgggttcacaccattctcctgcctcagcctcctgagtagctgggactacaggcgctcgccaccacacccggctaattttttttatttttagtagagacggggtttcaccatgttagccaggatggtctagatctcctgacctcgtgatccgcccgcttcggcctcccaaagtgctgggattacaggcgtgagccactgcacccggccgatttctagcttttgaaggagtgaggtctcggatctaggttagagattacccaactttttctgtaaagggctagacatttcatatggctttgcgggccacatggtctctgctgcaactcttcagctctgctgctgtagtgtgaaagtagccaaaggcactatataactgaatgagtatggacgtattccaataaaaccttatttacaaaattagttggtagacagtagtttgccaagttatgatttagttgtccatcagtgcataacaaaaaattgtctgtgatttgcaaaattgagaaccatacctggaaaaaatgtgtttatgattttccaggtctggaatctcttacataatgcattttgtgcatgactttttcaatttgctgaatttatctactttcctattattggatggttttactattagctgtatcttccaggaatgcaaccatgatttgattgagaaaaaggctctacttcgcttaagaaatttactgagttttttttaaccatttcaaaaagttatagtattgatggcaatgctaattgtgttatttgtcttgcctatagcaaatatgtatagaaacctccatttatagataatgcatttctatttattctatacgtacacatgaacacacatatatttagcctttatttcaaaatgtcaaatataaaaggtgtcaacaatacttagttacatattgtcattttataagtctaaatttcttcattataagtaattgtaggcataagcatttaattatttgtgccttctaatgtagttgtgtatgatcataaatatattgaaatattaagttgttcattatctccatttttgacatctatagatgtgtcgttattacctatgagtttcatttcagaagtagtagagacattgttatattttctttttgtatatagaaagcattgagtttgatcaagttaagaaccacaacatatgtctgtcccccttagtgtgtgttttgggggtgggagaaacaggaagaaaagaacaacaaagataattccaactgaatcatttgttactttgcaaaacacctggtctcatggttctgctttctcctccgtagctctgcattctccagactctgtgctttcctaagataggaacccagaagaggactgatcatttcttgcagctctaaaaaccatggctcgggtaaattggagtttccttgtgctcttttcacttacttttttacagagcatgtgtgtgtttgtattccttactcctgaaacttcattcctaactgacctcactcaggaatgtgctcctcagtttgtcccattctgataagtgatagtgtcttccctaagtgtgtctttcgaatctaacctttagtcacatacttactcaacaatatgtatattgttcagtaatctttgactaggaacactgatctaacaaaagtagagttccctgatttcataaggtagaggaggatgttaaatggcaccacacatgaaaaccttttgaacttctctttagatctaagttcccaggtagacaagacaggagttggtcttgactgggctcactctcagtatgtggcaagcgctcatgctttatgagtttttaagattaggaagatgattagggactgaatacagagagatcagggatcttccccaggaacatataatttaatatggatcaatttgaaattcgacattatgtgctggtcttgaatgtataaatttggattatgtttttcacctttctattgtttagaatgatgaaaagttacatttacggatgaatggtaaatatgatcatagtgaagatgatcattcaccagcagaagttgttgagaattataaactctgagaaccaagaaatacttacaagatttttacaacctaaaatgttcaaatatgagcacttattaagtcagacatattcattatatggagctattctgtagcctataaaatatttactaaattattgatgacaaggaaaatgtttatgatatagtactctgatctaatggtgaatctggagcttcaataaattctttaattttatacaaatcttattttataaggttttacagaaaaattttaccattttgtttattccttaaataatgaagagagaaacttacatttattgagaatgtatgatacacaatatacatattgtataaaatgcttgtgtatgctacttcttttaattgggacattgcatttattttattcccagacttatctgtaaagtaagatgttctgtatgcagaaaatatgtgtagcaggccaggtgcagtggctcacacctataatcccagcactttgggaggcctaagccttaaggccaggaattcaagactagcctgggcaacataacaagacccctgtctctacaaaaaaattggaaaattatcagggcacagtggcatgtactgtgagtggcacgtactgtggtctcaactactcaggagaatgagacaggatcacttaagcctaggagttggaggctgcagtgagctatgatggtgccactgcactccagcctggatgacagagcaagaccctgtctccaaaacaacaacaacaaaactatagcaataggaataatcaggaacatatttgtacttttcagcccatgtgctctgttgcttcctttgtggagggatcttcatctccctctccattgaaaaagtatttttttggccgggcacagtggctcacacctgtaatcccagcactttgggaggcctagtcgggtgaatcacaaggtcaggagttcgagactagcctggccaagatgatgaaaccttatctctactaaaaatacaaaaattaactgggcgcagtggcaggtgcctgtaatcccagctactcaggaggctgaggcaggagaattgcttgaacctaggaggcggaggttgcagcgtgccgagatcgcgccactgcactccagcctgagcgacagagcaagactccatctcaaaaaaaaaaaaagaaagaaaaaaagaaaagcattttttaaatttccaaaattaacattttgtttgttgtttcagaaattagtgatgttcagggatgttgccattgacttctctcaggaagagtgggaatgcctggactctgctcagagagatttgtatagagatgtgatgttggagaactatagcaacttggtatcactaggtaaggaatctagccttcatatttcaggatctacctttggattggctgctttctctgctgttatttcaaatttcctttttaagtaattaactgaatttcttattcttttcaaaggaggagtttgaaattactggaagtagacatggtttctcagggcacctttatcttttccatccttcaaaaagccttaccactgccttctaataccatcttccctgatgaacaaagggctagatttgaagtttgggatacttggaatattggcagataaaacagcctatacattgttacactttagatctgctaaaggagctctaaataattcacacgcccagtcacagatttaaaaaatagatgcagagatgtatgttttttctgataaaagagtttacatcatttgtatagtgatagagtagatcaatgcatttcaccaacaactcaaatgaagacaacccattaattagaacaaacacattgtcttatatgtgcttggtagttgaatattacatattaagaactttgggctgggctcggtggctcacgcctataatcccggcacgttgggaggccaaggtgggtagatcacctgaggtcaggagttcaagactagcctggccaacatggcgaaaccccatctccactaaaaatacaaaaattgagctgggcatggtggtgtgtgcctgtaatcccagttactcaggagattgagggaggagaattgcttgaacccatgaggtggaggttgcagtgagctgagatcacatcactgtactcctccagcctggatgacagagcgagactccatctcaaaaaacaaaaaaaaaagaacttgcattggacattgaatgaatatgctagaatcatcttttattgtaaaatagttgagggggaacctgtgattgtctaagaaactttattgttttcttctgtagtatttttatatgaaacaaaatccgtatcaattacaactttaataagtgattttccaacctacatgataactttattccttgtgctggaataaactgtctcttgcctcttccttcctttctcctctgaagcctttaggaagtcagtgattaacacatgtccctagaggacccaagtggtgtggaaaaaaacctatgacttgaggagaaaagcaagggtttttcaccatgatcttcctaaagactcttacctaatttctactgcgtcctttccctgttggtttttattatcattcttcccactttcaaaagagggaatggttggccgggcgcggtcttgtatgtgcttggtagttgaatattacatattaagaactttgggctcggctcggtggctcacacctgtaatcccaacactttgggaggccgaggagggcggatcacctgaggtcgggagttcgagaccagcctgaccaacatggagaaaccccgtctctactaaaaatacaaaaaattagccgagcatggtggcgcatgccagtaatcccagctactctggaggttgaggcaggagaatcgcttgaacctaggaggcagaggttgcagtgagccgagattgtgccactgcactccagcctgggcgacagagggagactctgtctcaaaaaaaaaaaaaaagtgcaaattaaaaccacaatgatatagttatttcacatgctataaattggcagcttgacagtaccaggcattctcaagatttgaaggcagaagtgcactatatcttgatattcacaatagccaaaaagtgggaacaacccaaatgtccatcaactaatgaatggataaaatttggtattttcttaaaacgaaatattattcagcaataaaaaggaatgaagttctgatacatgctttaacatggatgaaccttggaaacatgctataaagaaatacccgaggctgggtaatttataataaaaagagatttacttagctcatgcttctggaggctgtacgagcatagcactagtgtctgcttggcttctggtgaggtccaggaagcttttagtcatggtggaagggagggggagtcggtgtgtcactggcaagagagggggcaagagagagaggaggaaattcaggctcttttaaacaaccacatctcgcgtgaactcatagcgtaagaactcacgacagagtcttgctctgtcgcccaggctagagtgcaatggcccaatcttggctcactgcaacctccttctcctgggctcaagcgattctccttcctcagcctccccagcagctgggattacaggcacctgccaccacacccagctaatttttgtatttttagtagagatggtatttcaccttgttggccagactggtctcaaactcctgacctcgtgatccgcccacctccctcccaaagtgctgagactacaggcgtgagccagtgcacccggccaagaactcactctttaccacaaagatggcacgaagctattcatgagggatccacccccatgatccaaacacctcccaccaagccccacctctgacactggagattacattcaatgttagattacatcaacatgagatttggaagggacaaacatccaaactatatcccatgccaagtgaaagaagccaaatacaaacactgcatattatatgattgcatttatatgaaacgtcctcaatagggaaatctatactgacagaaagtaggttactggttacccagcactggggatggggaagaggtagaacagatggagaatggggagtggggagatgagaagtgactgctaatgaacacagacagcatttctcttgggggtgaaaaaatgtttaaaaattagattgttgtgattgttgcacatctcagtgggtatactaaaagccactgaattgtgcagaaataatatggaaatggttgccaaacttgtgtgtactttagaaatagctacggtcttttaaaaaattccacagcccaggccacaccccagaccaattaaataataatttctaggcatggtacatgagtatcatattttttgaaattctctaggtttttcaaatgtttagccatgtttgataaccactgcactgtggtattatctgagaattttttttaattgaatgttcactccatttaatttattaccaatatacttggatttatttatcccctattttatgctttttgtttcctctttttatcttacgggcttaaaaaactttctccctccttaatgagggtggatacaatcgtgttttattttttgcaactccattttcccccttgttttgtttggaaaacgtacagtatttatttatttttaaaagttatctttaaatttttatcatgtgtacctaattccttttaatgtcaatggtattttatagtttttattgattgtaattgtgtctgaaaattatatatttaatggacattatatattttgatggatactaaaacatatttattcagtccacatacaatatttggtttgcatattgctttgcaataaacttgctctatctccacccctaggatttcaaggccagcaagttgaaaaacagacatataaataatagtatctactgtgaaataaattggtaacctttgtggcaattagttgaggttctaaggagagataagaaattgacatctctatgtcaaatatatattttattgtcacagaattcttatcagaagtataccagcaatgtatatctattatatactttatcaacagtggctattagcacgtagaaatatctttgttaaggccaggcgcggtggctcacgcctgtaatcccagcactttgggaggctgaggcgggcagatcacgaggtcaagagatcaagaccatcctggccaacatgatgaaatcccatctctactaaatatacaaaaattcggtaggtgtggtggcacatgcctgtaatcccagctactcaggaggctgaggcaggagaatcgcttgaacctgggaggcggaggttgcagtgagctaagatcgcgccacagcactccagcctagtgatagagagagactctgtctcaaaaaaaaaaaaaaaaaagaaatatctttgttgatttgtagatgaaaaacagaagaacatttctgccattgccggtgaatttaaatactttgggggtatttctgcctgttttggtactttagtaattatcattattgtttgtgtcacttgacaaatacatgcttaatttagtgaagtctaaaattcatgtctaactttccttaagataattaaaggatattgaaatgctttaactttgatctgtttctccaatctggtattgttgtctggtattttagttctgttctttttttaacctacaaaatgggcattatttttgtttcataatggcaatgtttgcttgtggatttgttgatgtaattatcttttatttgtatgctattcctctttcattataccttccttctgggatattttatttatcatgaaatacattagggaaggcttattggttttatttttttcttttcttttcttttcttttttgagatggggtctcattcttgttgcccaggctgtagtgcagtggcgcaatttcggctcactgcaacctccgcttcccaggttcaagcgattctcctacttcagcctccccagtagctgggattacaggcgcccgcagccaagcccagcttattttttaatttttagtagagacggggtttcgccatgttggccaggctggtctcgaactcctgacctcaggtgatccacccacctccacctcccagagtgctgggattacaagtgtgagctaccacccccggcctgtcttattgttaataaatgctctaagtgtttgtttttgtcattgttgcaaaataaccttgtttcactgtcattcttgcctgatgatttaactaggtataaaattctatactgacaattatttttttctcagcactctgaagatattattccactgtcctctggcttctattgttgctcttgagaagtctgccatctgtttcattgttattccttttgtaagtaatctgtattttctctggctgcttttaagatttttttctttaagatttaaatgtaattgattatattgtttcacttctagatgtttgatgttctccccctctcccagatcttttttttttaagctcatccctttctcatggtttttatcttatactttcatatatttccagcacttatgtgtcatacaatcccaatttctgggaaacaggtctaattttgctgtttcttgtatccatggggactcttgtgtaatgatgaattatccatagcactttttttctccttttctttgagagtccaggccaagactgaaaagtcccttgtcattttcctttaaggtttgctggatttgtttttctttctctgaactttatgtcttgaatatttccaattttgtaaagaggtttgtttgtaatccctgctcttttgttgaggaaaggtcttgtctgttcagttttttcagaccattaatatacaaacatctaggtaattaaaatcaacaaatatcccaagggtaactgtaacttcagagcatatttactccatctactttctggttcctacttcattgtagcacccctggatcttgtttactttcttttatgcttcacatacttttaaaaggacatctgtcatatttttccagtatttgttagtgttttttaagaaatcggatgcaccatttacatattaacaatattgaatccttttattgttcagcatgctaaatctgcttttctttttatgttctctgtaaagtttcatggttttttcttattcttttttttttttttgagacagagtctcgctgtgtcacccaggctggagtgcagtggcgtgatctcggctcactgcaacctccgactccccagttcaagggattctcctgcctcagcctcccaagtagctgggactacaggcacctgccaccacacccagataattcttgtatttttagtagagacagggtttcactatgttggccaggctggtcttgaattcttgaccttgtgatctgcctgcctcggcctcccaaagtgctgggattagtttcatggttttttcttaaaagatcttgcacatttcttaagcaatttctcagtacattttgtttataatatgaataggaatattttgttctgtaacattttctaaatggctaatactgatatatattatatatgagaaagtattgatttctataaattgaaaatcttatggaaatatagtttttcagtggattatagtggatttctaggtggacagttttgctctctacatacaatatgtggtctcttccttttctgtttgtacctttaaaaaaaggcaactaaattcagtaggaccctgtagcggaatttgaaaacaaatcattcttatcttttctcaaactttattggcagtgtttctaatgtttaactattaaatgtatttctatagacatctggtagatactcttaactaggtttttacctaattccagttttagagaacttttaataaaaggtcttagaatatattaaaaatttttttgcatttcttgaaatcatgctattttattctttaagttctttatgtgggaaaatggactctgatgttgaattattcctgcatttgtgggataaagtttatatgatcatgatgtgttatgccttaaatacacagctagattctatgttcctaatattttcttttaaaattttacctttgttcacgagattggcttcgttttcctaaggtcatttttcaatgctgttatactagttaatttaactttgtaaaatgactagggtagattacaatatttttatatgttcaacaacagttatgtacgattggaattatatatccttttttcttttttttgagacagggtctccctctgtcacttaggctggagtgcagtggcctgatcacagctcactgcagcctccacctccctgagcccaggtgatcctagttgagactacaggcatgtgccaccatgcctggctaatttttgtagtttttgtagagatgaggttttgccacattgcccagactagtctcgaactcctgggctcaggcaatctacctgccttggcctctcaaagtgctgggattacaggtataagccaccacacccggcctatatattctttaatgtttggataatattgccagtaaacctaccagtcactggaatctattgccttgaatattagatataataggtactatgaccagcagatacaaatgatcatcagtcataggtatctattgccttttaggagcacagacactgagctcaaatttaaattttttatgtggttattgctgtatatcagttattatatcttcatgggttatttttcatgtttttcatctgtttcatccagttctaatttactgttgcgttaataggttttttcataaacacttttaaaagttttgttttattttagttgaaacataatgcacatatttatgggctaccatgtgatgttttatacatatgtgtattgtgtaattatcaaatcaggataattagcatatctgtcacctcaaacacttgtcatttctttgtggttaggacattcaagatgctctcttctagctatctgcaggcattcaggacatttttgttgactatatagtcaccttattgtgcaatagtacatcagaacttatttctcctatctaactataactttgtacccatagaccaatctcttcccagccaccccctcagcatctggtaaccactgttctactctctacttatatgagatcaacttttttaggttccacatatgagtgagatcatgtgatatttgtcctgttcttggcgtatttcacttaatataatgtcctctagcttcatccaagttgtcaaaaataacaggattttattcatttttataggttaatagtattctattctgcatatataccacatttttgaaaatccatttatcttttgatggacactgagttcgagtccatgttattgctattgtggatagtgctgcagtaaacatgggaatgcagatgcctctttgacatactgatttcctttcctttggatgtatacccagtagttagattgttggatcatatggtagttctatgtttacttttttgagaaacctccatactattttccataatggctgtgctaatttacattcccaccaagagtgtgtaagagttccccctttttccacatttttaccagcatttgttatcttttgtctttttaatagccattctaacagcagtgaggtgatatctgattgtagcttcgatttgcatttccctataattagtgatattgagcattttttcatttacctgtttgccatttgtatgtcttgagaaatgcctattcaaatcttttgactattttttaatcagattatttgtttttttgctgttgagttgactttcttatatattcttggtattaacaccttattagatgcatagtttgtgaatattttcttccattctgtaggttgtctcttttttgtttgctttgagatggagtctcgctctgtcacccaggctggagtgcagtggtgcaatctcggctcactacaacctccgcctgccaggttcaagtgattctcttgcctcagcctccagagtagctgggactacaggcacatgccaccacgcccggctaattttttgtatttttagtagagacggtgtttcactgtgttagccaggatggtctcagtctcctgaccttgtgatctgcccgcctgggccccccaaagagctgggattatagatgtgagccaccatgcccaggctgtaggttgtctctttactctcatttcctttgctgtacagaagctttttactttgatgtagtatgtttatctgtttttgcatttgtcagtgcttttgaggtattattaaaaaatccttgcccagatcagtgtctgtttccctgtgttttcttctactggtttcatagtttccagtcttacatttaagtctttaatccattttgagttgagtggtgagacaggggtctagtttcattcttttgcaggtggatattcagttttcccagcaacatttactgaagaaagtatccttttcccaatgtgtgttcttggccttcttgttgaaaatcagttggctgcaaatacttggattttttttttcctgggttctctatcctgttccatttgtctatgtgtctgttttcatgccaataccatactgtttggttactattgttttgtagtatattttcaagtcatggagtttgatgcctccagcttggttctttttgtacaagattgctttggcggcctggcgcagtggctcacacctgtaatcctaacactttgggaggctgaggcaggtggatcacctgaggccaggagtttgagaccagcctggccaacatggcgaaaccccatctctactaaaaatacaaaaaattgctgggtgtggtggcaggcgtctgtcatcccagctactcaggaggctgaggcaggagaatcacgtgaacctgggaggtggaggttgcagtgagccaagagtgtgccattgcactccagcctgggcgacaagagcaaaactccatctcaaaaaaaaaaaattgctttggctgtttggggacttttgtggttccatatgaattttaggattcttctttgtatttctgtgcagtgtcattggtggtattttgatagggattgcatagcatttgtagattgttttgggtagtatggacattttaacaatgttaattcttctgatccatgaacatggaaaatatttccacttattagtttcctctttaatttcttttgtcaatgtttatagttctcattgtaaaactcttgcctctttggttaaatttattccttttttttttttttttgctatctattataaatgggattgatttccttttcacagtttcctgttggcctatggaaatgctacttatttttgtacattgattttgtcagtcattagcaccttattttgttcatttgttgagctcatattttcctgaatgttcttgatgtttatggacacgtgatgtctgtgcactgagcaatttattcaagagtttgcaggccggaacctggtatctcacgcctgtaatcccagcactttgggaagctgaggcgggtggatcacctgaggtcaggagttcaagaccagcctgaccaatatggtgaaaccccatttctactaaaaatacaaaaattagctggccatggtggtgtgtgcctgtagtcccagctactcaggaggctgagacaggagaattgcttgaaccctggaggcagaggttgcagtgagctgagatcatgccactgcactccagcctgggcagcagagcaagactccatctcaatcaatcaatcagtcaatcaatcaagttcacagtctagctttgtttgtgcccatccttcttccaaaggccttccagacattctaagcagactatctatctgttgtattcccttgagcctgtaaccactgcatccatctcagcattaaagggcattaagcccaggcttcctgctagccttgcaagggctccaaggttgttgtggctctccacctgggtggacctagagaaaacccaagaaggatactggtgctgtatgggagtccagacagggacctgagcccagaagactgtcctggtggcccagatgggtgtgccttcagcaggtccttgcacaggcaagataggtctctaattacagtgagagggctggagctgagactgggccccctcaggatttgctgtcctacaggacagaggctggcaagcctatcttgttggcttagacaggtgtacatctcccagcatgtctctgcacagatggggtagttctatgactgcaacaggaggggctagagcttagactgggccctctcgggatctgctgtgggacagaggcttccatgcacagatggaatagttccctgactgcagtgggaggtgctggagctgagcctggaccccctgaggatgtgctatgggatggcagctgatgagcccatctcagcccacatgggtgtgtctcccaccgtgtctacacggaggggatagttctccagttattgcaggagggcccaaggcaaagactgggcttcctcaaggtctgctgtgggacagaggttggtgagcccatcgtgaagactccaactcccaaaccatgagatacggatgaatcttactctggatccttgtatgagcggttctgagctggcacccccagctgaggaggctggagctaagccacagagcaactgtgaggttcactaccaggactgttgtcagcaggcataagagactctccacctagacactagtgtgcatgattcctcctggacctttaggcagatggttttgattgcacgcccaaggccaaatggggctgtagccaagccctctggggaatggggccattttcaagctttgaacatgggatcagcatgggagatcagccacctgcgtgccagtctgcactctcaaaatgactttcctaggtcttgggctttactcaagttttacaacctcctacctgaattccaaagcttctgcaaagagacttttatctgtggatgggtgcagaattctcgtgaggggatatgagtgggttacctcctatttctgccatcttgctgacgtcactcccataatctctcataaacactttttaactcctcaatttatggttacctttttctctccagtgctttggatttgtgctaaatctaatttttttctacacgtcactttttttgtattatttatggatattttcaaataattttggtattttgattttgctaattatttctgctgtttctacgtttctaatttactcattttctgattttttatctcacttatattttggtttttagttatgctttttgctcacttcttcttgaggtgaaatcttaattctcttaactatagtatttcttgttttttaataaatgcacttaagactgtaaatttccctgggtacaattttagctgatttcttgggatttcacacaaagtttcttttgctatttggctctaaattgttttaaaattttatttttatttccttctataacaaacatcatatagaattgtcttagtaacttaattctaggattatatgttttttctatgtttttataatttttagttttatgctaatgtgataattaaaaacattttatgtcagttttatctatcttcctatattactaattatgttatagtcttccttgtttttatttctggtctgtttatattctattctctactatgacggtgattaatttctctatatgtctgctagtttttgtttatttaggagctaagttgttggttacataatggtcatgactattcatcctcttgcctggctcttagatgatgtccctgagctgatctcactgagaaaactgaagctagcagaagagaagagagattcttgcttccttgtctgtttacctaccttcatctatactaattcaacctcttttcctattaacatgtaacctttttgtgcctttacttaagcccagtaccctcacttgtatactgaattccattccttctcatatttttaaggacactgttgaagcaattgccctttgtctcttctaacatgaacttgtccatatcttttacaataattttcatcagcatacaaacatgccttaatttcttctatcttaaaaggaaaaaaaacaaaaccaaatattttgacacacattttcctcttgatatagctccatttctttgctactttttacagaaaaatacaaaagaattttccatattccctaactccagctcttctctcattttttttttgtctttttttttttttattatactttaagttctagggtacatgtgcacaacgtgcaggtttgttacatatgtatacatgtgccatgttggtgtactgcacccattaactcgtcatttacattaggtatatctcctaatgctattcctccccccttccccctcccccgaccccacaacaggctccattgtgtgatgttccccttcctgtgtccaagtgttctcattgttcaattcccacctatgagtgagaacatgtggtgtttgtttttttgtccttgagatagtttgctaagaatgggtttccggcgtcatccatgtccctacgaaggacatgaactcatccttttttatggctgcatagtattccatggtgtatatatgccacattttcttaatccagtctatcattgatggacatttgggttggttccaagtctttgctattgtgaatagtgctgcaataaacatacgtgtgcatgtgtctttatagcagcatgatttataatcctttgggtatataccaggtaatgggatagctgggtcaaatggtatttctagttctggatccttgcggaattgccacattgtcttccacaatggttgaactagtttacagtcccaccaacagtgtaaaagtgttcctgtttctccacatcctctccagcacctgttgtttcctgactttttaatgattgccattctaagtggtgtgagatggtatctcattgtggttttgatttgcatttctctgatggccagttgatgatgagcatttttccatgtgtctgttggctgcatatgtgtctgttggctacataaatgtcttcttttgagaagtgtctgttcatatcctttgccgactttttgatggggttgttttcttcttataaatttgagttctttgtagattctggatattagccctttgtcagatgggtagattgcaaacattttctcccattctttaggttgcctgttcactctgttggtagtttcttttgctgtgcagaagctctttagtttaattagatcccatttgtcaattttggcttttgttgccattgcttttggtgttttagacatgaagtccttgcccatgcctatgtcctgaatggtattgcctaggttttcttctagggtttttatggttttaggtctaacatttaagtctttaatccatcttgaattaatttttatataaggtgtaagggagggatccagtttcagctttctacatatggctagccagttttcccagcaccatttattaaatagggaatcctttccccatttcttgtttttgtcaggtttgtcaaagatcagatggttgtagatgggtggtattatttctgagggctctgttctgttccattgatctatatctctgttttggtaccagtaccatgctgttttggttactgtagccttgtagtatagtttgaggtcaggtagcatgatgcctccagctttgttcttttggcttaggattggcttggcaatgcgggttcttttttggttccatattgaactttagtttttttccaattctgtgaagaaagtcattggtagcttgatggggatggcattgaatctataaattaccttgggcagtatggccattttattgattcttgattcatcattgattcagtatggccattttacgatattgattcttcctatccatgagcatggaatgttcttccatttgtttgtgttctcttttatttcactgagcagtggtttgtagttctccttgaagaggtccttcacatcccttgtaagttggattcctaggtattttattgtctttgaagtaattgtgaatgggagttcactcatgatttggctgtttgtctgttattggtgtataagaatgcttgtgatttttgcacattgattttgtatcctgagactttgctgaagttgcttatcagcttaaggagatttcgggcagagactatggggttttctaaatatacagtcatgtcatctgcaaacagggacaatttgacttcctcttttcctaattgaataccctttctttctttctcctgtctgattgccctggccagaacttccaacactatgttgaataggagtgatgagagagggcatccctgtcttgtaatgcttccagtttttgtccattcagtatgatattggctgtgggtttgtcataaatagctcttattattttgagatacatcccatcaatacctaatttattgggagtttttagcatgaagggctgttgaattttgtcaaaggccttttctgcatctattgagataatcatgtggttttgtctttggttctgtttatatgctggattacatttattgatttgcatatgttgaaccagccttgcatcccagggatgaagcccacttgatcatgggtagataaactttttgatgtgctgctggattcggtttgccagtattttatcttctctcattcttttgaatctggttcagtcagaacttgctcccattattctgccaaaactattattgtgaagattaccagtaatctccattttgctaataatgccatttttaacttaggaagcacgatttaggccgaacacggtggctcacacctgtaatcccaccactttgggaggccaaggcagggagatcacctgagggcagaagttcaagatctgaaggggtggcctgcccctccatacctgtgggtgtttctcgtcaggtggaacgagagactgagaaaagaaagagacagagacaaagtgtggagaaagaaaagtgggcccaggggaccggtgcttactggtctctgagttccctcagtatttattgatcattatctctaccatctcggagagggggatgtggcaggacaatagggtaatagtggggagagggtcagcgggaaaacatgtaaacaaaagtctctgtgtcgtaaacaaggttaagaaaaggtgctgtgccttgatgtgcacgtgtacaaacatctcggtgcattaaagagcagtattaccactagcatgtctctcctccagccctaaggtggttttctcctatctcagtaaatagaacatacaattgggttttacactgagacattctattgcccagggacgagcaggagacagatgacttcctcttatctgaactgcaaagaggccttcctcttttactaatcctcctcagcacagacccttttcgggtgtcgggctgggggatgtcgggctgggggacagtcaggtcttacccttcccatgaggccatatctcaggctatcacatggggagaaatcttgggcaatacctggctttcccaggcagaggtccctgtggccttccacagtgtattgtgtcctgggtacttgagattagagaatggtgatgacttttaacaagcatactgccttcaagcacttttttttaacaaagtacatcctgcatagccctttggtaaatccattaaaccttgagtcaacacagcacatgtctctgtgagcacagggttggggctagggttacagattaacagcatctcaaggcagaagaattttcttggtacagaacaaaacggagtctcttatgtctacttatttctgcatagacacggtaacagtctgatctctcttttcccatttcccccttttcttttggacaaaaccgccatcgtcatcatggcccgttctcgatggtcgctgtctctttggagctgttgggtacacctgcagactaacaacagacagaacaggcacacaaggattaataggaaatttacaatagtagaacttccgatggtcttaacccaagtgacagggttaagatttgtgagaccatcagcaactccatgattgcctcagttcctggtaccaaatttaatgggctttgatccttcaaaaatttgttcttttaatttggaaatgtctaaagtgagattatcttttcttccctgtagacggcatctaaccatgtcccagtgatgctcagactcattataaactccaggtgtaatacaaaaatctgacgtattccagtcacactgtaactggaaatgatgttctaagctcatgagcctatctcccatccaaatgacagtctaagatcattaatttgatttgccaatttttgatcaataccagattgtgaattccaccatcttgtagaattcttttgccaatcattaacaaagtttactgtccgaacagaagagtgcaatgcaactcctgccacagcggctgtagttgtgactgcgattaatcccataatcactgcaattaaagtaaaaatgaatcttttggatctatttaaaatgacttttaatacttcagtcaaaatatggatggatggcgaggcctcccactgtcggtccatggacacagggatccacacgccttcccttgctctcactagcagaatacggtgctgccaattgaaagttgaatcaatgcaagtaaacaatctgcaattttcacaggttatatagtttgggagtctggtttaataactatatttcctacaactagcatataagggcgctttatacaactttgtaaagaaaccgttagacttgaatttaggtcgatagtataaaatggcttatgatctcctgtttctatagcttgatttccagatcaaattctaatgcggtatgaggccacagtaagcctccataattctggatgttcaggaccagaaacaggacttattatttttggtcttggagtagagattcctttttctccccattcccaagggtagaaagactgtaattttttgtgcttatgtttgtctaaactttctgttaagtcactatcaacagttggactcacttgtgcactgggacatgactgagtttgtcctgtgcaattgtggtagaattgacctcgaggtgcccaatctataatagttccaaattcatcattttgtaatatcaccacactattggccacacattcttcctaaactaaaacttctgtgtcttttgataccttgggaatttccgtggggcaaggtttccctttaggcctacattttaatgatctttgataagaaaagtcctgtaaataatttacctgtggcctgagtgacattccgcttaccatgtgataagtgaatctactggtggtacagtaagtaagtacttctaccaaccaattttggattgtaggcattaaacatcctggtgttctccctagacaaataggaggataacgatacccagtagaaatatttatcgtcattccttcttcctcaggtttggcagggcagtgatcatctgtggggccaggtacccatacactgttattaacatatacttcaataggattatccatccatgcgactgcccgaattaagggcaggaaaggcacacaggcccagtaggtataattagctgcagctgctcctacaggcatggggagacttaccaccattgatacaatcatcaaagctgcaagcagcatactctctggagtttgtgtcacctttgtgttctcaaggccttttttagctaactgtgtcagcttctttaattgtgcccaagtcggcggctctgccttcttggtgaatggcaacttcatctattcttctgacatcaccattttatcttgtgagttgatggtgcttgattgcagtgtttctgtctccgtggaggtgcttttctttgcatctccgacaggttcattgtagaacttcaaatgtctagttggtatccaaacaggaagctgattttctcctggtgaaacacaagcaaaacctctcctccacgttaccaccttccctatttcccatgtcttattgttgttgtctttccaccaaatcagttttccttcatgtgggctattcttttttttaccagtaagatgttgttctgcaggagtagtagtctgatttctataaatgtttaaaaaatttaaagtatagagtgctagattaagttgcatctgaggagtggtacactccttactgtctcccccttctttttgtttaactaattgagttttgtgtgttctattagttctttcaactatggcctgtccttgggaattatagggaattcctgttgtatgtgtaattttcttggaaagctttactacagtatcctggtccattgttagttttaattttttctggaactcccattacagcaaaataagataataaatgttttttaacatgggaagtactttctcctgtctggcaggttgtccatatgaaatgtgagtaagtatcaactgttacatgaacacatgataatcttccaaatgaaggtacatgcgtgacatccatttgccataacgcattaggacacagacctctgggattaacttctgcctcttgagtgggcaggtgtaggacttgacactgggtgcaatgttgtacaatattttttgcctgtttctatgtgacatcaaatttgttttttaatcctgctgcatttgcatgagccaaagcatgaagttcttgtgcttttatgaatgcagatgataccagtaagtcagcttgttcatttgctttagtcaaaggccctggtaaattagtgtgtgctcgaatatgagtaatataaaatgggaaatttctttttcttacagtttgttgtaataaattgaatagctggtttaactgatcatccatgctatatttgattagagctgtctcaacatcccttgtagcctgtactacatatgcagaatctgatacaatattgatagattgatcaaaatcttataacactgtaatgactgcaaccaactctgctctttgagccaattgatactgagttttgattacttgctcttttggctctgtgtaagctgcttttccattgttggaaccatcagtatatactgtcagagcattttctaaaggtccgtgactggtaattttaggtaaaatccaagtagtcaattttaaaaactggaggatttttgtttttgggtaatgattatcagtaattcccacaaaatcagcaagaccaatctgccatgcaccagaattgataaaggcttgtctaacttgttccttggttaaagggacaactattttgtctgggtcatttccacacaattttattattcgtaatcttgcctgaccaattaatgtagctatttgagccaagtataatgtaaaagtcttaattgtactgtgaggaaggaatgaccactccacaagatcagtattttgaacaatgatgcctgttggaaaatgtgcagtagcaaaaatcaaaagttggagtggggctaagggatctattctatttattgcactgactgaattttttcttccactaatttaatttcttttgttgcctctcgggttaatattcttttactatttaagtctgggtctcctcttaagatagagaacaaatttgacatggcataagtaggaatacctagagttggccaaatccaattaatgtctcctagcaatttttgaaaatcatttaatgtttttaatgtgccttttcttatttctattttttgtggcttaatttttttattttctatctgcatccctaaataatgaaaaggagtagaggtttgaatcttaccagatgctattgccagtcctgcgttggcaacctctgcttgcagaaatgtgtaacagtcaattaatttgtctctcgtttctgcagcacatcaaatatcaacgtaatgaataacagtctgaaaacttatctctaactggttgaagagcttgacctacgaaagtctgacaaatagttggactattaagcattccctgaggtaacactttccactgaaacctggtggctggttctttattatttatggctggtatagtaaaggcaaatttttcacaatcctgctccaccagaggaatggtaaaaaagcaatccttcagatcaattataattaaaggccagtcttttgggatcatggccggagagggcaaccctggttggagatgccccatgggttgaattatggcatttacggcccttaagtcagttaacattcgccatctgctggattttttctgaattacaaacacaggagaattccaaggcgagaatgaaggctcagtatgtccgttttctgattgttactttgctaataaatgtaaagcctccagttttcgttttggtagcagccactgatttacccatacaggtttttctgttttccaagttaatggagtgggtttaggaggatctacagtggccgcccctaaaaaggataccctattgctgctgtttcttgatttccctcaatctcaattgggactttaatgccattttcattttttcctagtccctttcctggtatatatcccatcttagtcgtgattttttgatttgtggggctatataatggggcaggcatagtgatttcctcaccccattgttgtaataaatctcgaccccacagattaacgggaattgaagtaatcattggctgaacagtactttcttgattatctggccctaagcaatgtaaaatctcagcactttgatacacttctgaggcagtgcctacgccgacaagtcctgtaacagccttttgtttaggccaattttttggccaccgattgaaagcaatgatagagacatctgctgcagtgtctaccaacccctcaaactgttttccttgaataatggccttacacacaggtctgctctctgagacctgacttgcccaatatgcagcctagctggatcagtgcttccaaaccctcctgttctttttatctcactgttttcaaccttaatataaggcaggaataattaagcaatcctgtctcctggactggcactccaaggaactgaggagctaataaccaattgaatttcgactttgtagtctgaatcaaccacaccagtatgaatttgaactccctttagatttagactcgatcttcctgagattagtcctacagtcccctcaggccgtgggccatatatccctgtggggatttttttgtgggggctccctggaagcagagagactgcttgtatagtacacaaatctactgctgcactgccgcttgtggccggggacagttgctgtattgtggtaactggcccattccctgaagcacttgtgacagtgggggttgttgtccctgaaaaccctgaggaacaaagggctaaattgggaatgccccagtttgttgcggggcctgaggctggcccctcttctcgtttcccgacaatggttgcccatttttatcaaatttagaatgacattgactagcccaatgttttccttttttacctcttggacataagtcaggtggctctttatctgttcttgtagtagtttgaatagttatattttgtttatttgaggctgggcaattctttttttgatgaccaatttgtccacaattataacattttcccctaaatgttctaacttgtcctcctaaagcaagtcccgttattgcttgagcgataagcatagctttatgcatagctcctccaattccatcacaggcttttacgtactcttgagattacatctgatcccactgggacctttccttttaatggtttaatggctgattgacactcaggattggcattttcgtatgccatcaactccactatgaccttacgggcattctcattggtaattgacttttgagcagcatcttggaggcttgccgcaaaatcagggtagggctcctttagcgccttgtcttattgtattgaatgaggggcaggcggttcctgggtcttggcttttttcccaggctctaaggcagataggtctaacttgctcagtggcctcattttacattattgcttgttaattagtagtgctccaattttgacctgttcctaatagttgatctgcatctatgttaactggaggattggcagccctatttttttggacctgttcttgtgccccatcaatccaccaagtcttcaccaagtcttaaattgtaaacattgagagggtgagagcgatcatttggccaaaatctcccaatcataaagaatgagtctatgtccatgagcaatggaatctaataatgtcctcatataaggggagttgggtccatactgttttactccctctttcatatcttttagcatttttatggaaaaggactcatatctggcctcagctaggggaggcgctccctcttgggcctcttcttcaggtggtatcggttctaatattactgggaattgccatgcctcggtatctccttgttttcttgccttatcaataattttatgtaatgcactaccctgtccactaggtggtggtgtaggattaaatctcatagtgggctgctgaggatatagcgccctgccctgtggtgctggaaacattcctggctgtccatactgattttctgggggcggctgatcctgaagttcggctggcggccagtattgataggttactggcggttgggtcttattttccaccggctgatattgtggatactgtatttggattggcattgccgtgacagagactctatctttccctatttgatattcttttggggtttgtacttgtctaacctgcatttgaggttgtaatgttacaggcatctgaactgctgggagaggagttggccatcgtggtttagactctgatggccccactaattctggacctttttcttctaattttaacatttcaggatatatcacttcctgtaattgattatagtcaacattttgcattgaccgaaccattaccggctctgctacatatttacaatgtgaactttccgttcctttcccagattctatccctgcctcttcttcacaatctattacacattttccagggcatcagaaactgaaatgctatcttctcctgtttgaaacagttctaaagctactttaataatggcccaatcattccatactgtaagtgggatgattttaccctccctacttgcttgttttaattctttgccaattttttcccaatcttttagatctaaagttccccgttctagaaaccatgggcagaattgttctattgtttgaaatagagtgattagattttttttgtagagactctgactccccctctttttaaaagaattttaatggagctaagaggcatatttacttttagtttgtcccattgttaccctggcttcttctgagcgcacaagtttaccgcaaagggtgaccatagacgtactcaggaatctctcgttgacttgtcctcattgaccacgctcgagcgtaccttcaccctagagaaaagcacctacgttggacacccgatgaaggagtggcctgcccctccacacctgtgggtgtttctcgtcaggtggaatgagagacttgagaaaagaaagagacacagaaacaaagtatagagaaagaaaagtgggcccaggggaccggcgctcaccatacggaggacccgcgccagcactggtctctgagttctctcagtgtttatggatcattatctctaccatcttggagagggggatgtggcaggaccgtagggtaatagtggggagagggtcagcaggaaaacatgtgaacagaggtctttgtgtcataaataagtttaaggaaaggtgctgtgccttgatgtacatgtatacaaacatctcggtgcattaaatagcagtattgctgctagcacgtctcacctccagccctaaggcagttttcttctatctcagtaaatagaacatacaattgggttttacactgagacattctattgcccagggacaagcaggagacaggtgccttcctcttatctcaactgcagagaggccttcctcttttactaatcctcctcagcacagaccctttacgggtgttgggctggggggcggtcaggttttcccttcccacgaggccatatctcaggctatcacatggagagaaaccttggacaatacctggctttcctaggcagaggttcctgtggccttccacagtgtattgtgtccctgggtacttgagattagagaatggtgatgacttttaacaagcacgctgccttcaagcacttttttaacaaagcacatcctgcatagccctaaatccattaaaccttgagtcaacacagcacatgtttcagggagcacaaggttgggggtagggttacagattaatagcatctcaaggcagaggaatttttcttagtacagaacaaaatggagtctcttatgtctacttctttctacatagacacagtaagaggctgatctctctttcttttccccacaaagaccagcttggccaacatggtgaaaccctgtctctactaaaaatacaaaaaaatttagccaggcatgatggcacacgcagggattcccagctaccttggagctgaggcaagagaattgcttgaatccaggaggtggaggttgcagtgaaccgagatcacaccactgcacttcagcctgggcaacagagcaggactccacctcaaaaaaaaaaaaaaaaaaaaaagaatgcaccatttcgcctcatctctcagcatttgacataaccgatcattccttcttaaaacactttttttggaaaatatgggtggagccaagatggccaaataggaacagctctggtctacagctcccagcatgaacgacgcagaagacgggtgatttctgcatttccatctgaggtaccgggttcatctcactagggagtgccagacagtgggtgcaggacagtgggtgcagcacactgtgtgcgagccgaagcagggcgaggcattacctcactcagtaagtgcaaggggtcagggagttccctttcctagtcaaagaaaggggtgacagacggcacctggaaaattgggtcactcccaccctaatactgcgcttttccaacgggcttaaaaaacagcacaccaggagattatatcccacacctagctcagagggtcctatgcccatggagtctcactgattgatctcagactgctgtgctagcaaactgcaaggcagcagcgaggctgggggaggggtgcctgccattgcccaggcttgcttaggtaaacaaagcagcctggaagcttgaactgggtggagcccaccacagctaaaggaggccttcctgcctctataggctccacctctgggggcagggcacagacaaacaaaaagacagcagtaacctgtgcagacttaaacgtccctgtctgacagctttgaagagagtagtggttctcccagcacgcagctggagatctgagaacggacagactgcctcctcaagtgggtccctgacccccgagcagcctaactgggaggcaccccccagtaggggcagactgacacctcacatggccgggtactcctctgagacaaaacttccagaggaacgatcaggcagcagcatttgcggttcacgaaaatcggctgttctacagccaccgctgttctgcagccactgctgctgatacccaggcaaacagggtctggagtggacctctagcaaactccaacagacctgcaggcgaggctcctgtctgttagaaggaaaactaacaaacagaaaggacatccacaccaaaaacccatctgtacgtcaccatcatcaaagaccaaaagtagataaaaccacaaagatggggaaaaaacagagcagaaaaactggaaactctaaaaagcagagcacctctcctcctccaaaggaatgcagttcctcaccagcaacagaacaaagctggatggagaatgactttgatgagttgagagaagaaggcttcagacgatcaaactactcccgagctacaggaggaaattcaaaccaatggcaaagaagttaaaaactttgaaataaaaattatacgtatgtataactagaataaccaatgcagagaagtacttaaaggagctgatggagctgaaagccaaggctcaagaactatgtgaagaatgcagaagcctcaggagccgacacgatcaactggaagaaagggtatcagtgatggaagatcaaatgaatgaaatgaagcaagaagagaagtttagagaaaaaagaataaaaagaaacaaacaaagtctccaagaaatatgggactatgtgaaaagaccaaatctatgtctgattggtgtacctcaaagtgacagggagaatggaaccaagttggaaaacactctgcaggatattatccaggagaacttccccaatctagcaaggcaggccaccattcagattcaggaaatacagagaacgccacaaagatacttctcgagaagagcaactccaagacacataattgtcagattcaccaaagttgaaatgaaggaaaaaatgttaagggcagccagagagaaaggtcaggttacccacaaagggaagcccatcagactaacagctgatctctcagcagaaactctacaagccagaagagaaggggggccaatattcaacattcttaaaagaatttccaacccagaatttcatatccagccaaactaagcttcataagtgaaggagaagtaaaatcctttacagacaagcaaatgctgagagattttgtcaccagcaggcctgccctaaaagagctcctgaaggaaacactaaacatagaaaggaacaacctgtaccagccactgcaaaaacatgccaaattgtaaagaccatcaaggctgggaagaaactgcatcaactaatgagcaaaataaccagctaacatcataatgacaggatcaaattcacacataacaatattaactttaaatgtaaatgggctaaatgctccaattaaaagacacagactggcaaattggataaagagtcaagacccatcagtgtgctgtattcaggaaacccatctcacgtgcagagacacacataggctcaaaataaagggatggaggaagatctaccaagcaaatggaaaacaaaaaaaggcaggggttgcaatcctagtctctgataaaacagactttaaaccaacaaagatcaaaagagacaaagaaggccattacataatgttaaagggatcaattcaccaagaagagctaactatcctaaatatatatgcatccgatacaggagcacccagattcataaagcaagtcctgagtgacctacaaagagacttagactcccacacaataataatgggagactttaacaccccactgtcaacattacacagatcagcaagacagaaagttaacaaggatacccaggaattgaactcagctctgcaccaagcggacctaatagacatctacagaactctccaccccaaatcaacagaatatacattttttttcagcaccacaccacacctattccaaaactgaccacatagttcgaagtaaagctctcctcagcaaatgtaaaagaacagaaattataacaaactgtctctcagaccacagtgcaatcaaactagaactcaggattaagaaactcactcaaaaccactccactacatggaaactgaacaacctgctcctgaatgactactgggtacataatgaaatgaaggcagaaatcaagatgttctttgaaaccaatgagaacaaagacacaacataccagaatctctgggacacattcaaagcagtgtgtagagggaaatatatagcactaagtgtccacaagagaaagcaggaaagattcaaaatggacaccctaacaccacaattaaaagaactagaaaagcaagagcaaacacattcaaaagctagcagaaggcaagaaataactaaaatcagagcagaactgaaggaaatagagacacaaaaaaaaaccttcaaaaaattaatgaatccaggagctggttttttgaaaagatcaacaaaattgatagactgctagcaagactaataaagaagaaaagagagaagaatcaaatagatgcaataaaaaatgataaaggggatatcaccaccaatcccacagaaatacaaactaccatcagaatactacaaacacctctatgcaaataaactagaaaatctagaagaaatggataaattccttgacacatacaccctcccaagactaaaccaggaagaagttgaatctctgaatagaccaataacaggatctgaaattgtggcaataatcaatagcttaccaaccaaaaagagtccaggaccagatggattcacagccaaattctaccagaggtacaaggaggagctggtaccattccttctgaaactattccaatcaatagaaaaagagggaatcctgcctaactcattttatgaggccagcatcatcctgataccaaagcctggcagagacacagccaaaaaagagaattttagaccaatattcctgatgaacattgatgcaaaaatcctcaataaaatactggcaaaccgaatccagcagcacatcaaaaagcttatcccaccatgatcaagtgggcttcatccctgggatgcaaggctggttcaacatacacaaatcaataaatgtaatccagcatataaacagaaccaaagacaaaaaccacatgattatctcaatagatgcagaaaaggcctttgacaaaattcaacaacccttcatgctaaaaactctcaataaattaggtattgatgggatgtatctcaaaataataagagctatctatgacaaacccacagccaatatcatactgaatgggcaaaaactggaagcactcactttgaaaactggcacaagacagagatgccctctctcaccactcctattcaacatagtgttggaatttctggccagggcaattaggcaggagaaggaaataaaggttattcaattaggaaaagaggaagtcaaattgtccctgtttgcagatgacatgattgtgtatctagaaaaccccattgtctcagcccaaaatctccttaagctgataagcaactacagcaaagtctcaggatacaaaatcagtgtacaaaaatcagcagcattcttatacatgaataacagacaaacagagagccaaatcatgagtgaactcccattcacaattgcttcaaagagaataaaatatctaggaatccaacttacaagggacgtgaaggacctcttcaaggagaactacaaaccactgctcaatgaaataaaagaggatacaaacaaatggaagaacattacatgctcatgggttggaagaatcaatatcatgaaaatggccatactgcccaaggtaatttatagattcaatgccatccccatcaagctaccaatgactttcttcacagaattggaaaaaactactttaaagttcatatggaaccaaaaaagagcccgcattgccaagtcaatcctaagccaaaagaacaaagctggaggcatcatgctacctgacctcaaactatactacaaggctacagtaaccaaaacagcatggtactggtaccaaaacagagatatagatcaatggaacagaacagagccctcagaaataatgccgcatatctacaactatctgatctttgacaaacctgacaaaaacaagcaatggggaaaggattccctatttaataaatggtgctgggaaaactggctagccatatgtagaaagctgaaactggatcccttccttacaccttatacaaaaattaattcaagatggattaaagacttaaacgttagacctaaaaccataaaaaccctagaagaaaacctaggcaataccattcaggacataggcatgggcaaggacttcatgtctcaaacaccaaaagcaatggcaacaaaagccaaaactgacaaatgggatctaattaaactaaagagcttctgcacagcaaaagaaactaccatcagagtgaacaggcaaccaacaaaatggtagaaaattttcgcaacctactcctctgacaaagggctaatatccagaatctacaatgaactcaaatttacaagaaaaaaacaaccccatcaaaaagtgggtgaaggatatgaacagacacttctcaaaagaagacatttatgcagccaaaaaacacatgaaaaaatgctcatcatcactggccatcagagaaatgcaaatcaaaaccacaataccatctcacaccatttagaatggcaatcattaaaaagtcaggaaacaacaggtgctggagaggatgtggagaaataggaacacttctacactgttggtgggactgtaaactagttcaaccattgtggaagtcagtgtggtgcttcctcagggatctagaactagaaataccatttgacccagccatcccattactgggtatatacccaaaggactatatatcatgctgctataaagacacatgcacacgtatgtttattgtggcactattcacaatagcaaagacttggaaccaacccaaatgtccaacaatgatagactggattaagaaaatgtggcacatatataccatggaatagtatgcagccataaaaaatgatgagttcatgtcctttatagggacatggatgaaactggaaatcatcattctcagcaaactatctcaaggacagaaaaccaaacaccgcatgttctcactcataggtgggaattgaacagtgagaacacagggacacaggaaggggaacatcacactccagggactgttgtggggtggggggaggcgggagggatagcattaggagatatacctaatgctaaatgacgagttaatgggtgcagtacaccaacatggcacatgtatacatatgtaacaaacctgcacattgtgcatatgtaccctaaaacttaaagtataatttaaaaaaacaacaacacatttttcacatggcttctggggttccgtgctctcttaatttttctccttcctcaatggctattccttcttagtctccattgctgtttccttctcatctacctgaagtgacccagggttcaatcctcaaacttccctttttcatccttccccttctgttttgtatataaaggtacgccctgggtgacctcatcaaatcttgtagctttaaatgttatttcgtgatgactttcaaacttatatttgtaatccagatacctccccagagtcacatacttacacatttgtgtctattgaacatcttcatttgatatctaatagttcaaaaccagacttttcacaatccctcccaggtctgccccatcacagtgaggagttctcagtaagtagcacttccattgttccaacctttcaggcaaaacctgcatagtcttccttgtcttctcttttcatgttacatgtccattccaccaacaaatcctctgtagtataccttcaaaatatatccactatctaatgatacctcacttcctccacccttacctccaccatcatctggtctgagtcaggtggattattgttgtagccgcctaatttctatccatctagcttctgtactttcccattaactatctttgtatttactaattttggctccccaactcagagtaaaagtcgattttttaaagatggctgagactgaggtcagatggattttttcctgtctctgaactttaggccttgaataggttccaattttgtaaaatggtttatttctaatccctgcccttttgtgggtgaaggccttgtctcttgaattttttcagaacactaagatacaaccttaggctattgaagccagcaaatgtcccaagggtagctctaacttcagagcatgttcacctctccagtttctggctctcagctctcacttcattgcttgacttctttattttcttttactcttgtctttttttttttttttttttttttgagcggagtctcgctctgtcacccaggctggagtgcagtggtgcaatcttggctcactgcaacctccacctcctggttcaagtgattctcctgcctcagcctcccgagtagctgggactacaggcgtgtgccaccatgcccagctaatttgtgtgtgtgtatttttagtagagagggggtttcacgagtgttagccaagatggtctcaatctcctgacctcgtaatccgcccgcctcagcctcccaaagtgctggtattacaggcatgagccactgcgcccagccttaatcttgtctatatttttaaaaggatgtttgtcatattttacccaccatttattggtgtttgttaagaaatctgatataccattcagataccaactgtatccacctactgtcacagtcataatatacaacagttctattaaccatccctaaattccctcatgctttcttctttcattgtcaacctctcccctttaaccattcccagcctatgaaaaactactcaccaaattccatccatatagttttgctttgtcaagaatgtcatataaatagaatcaaaatatggcttttctcacttagcaaaatatatttaagatttatccatattgttgcatggatcaatttgtttctgttattgttgagtaatgttgcatgaatcaatactttgtttctgttattgctgagtaatgttccagtacctggaatggccaaagtttgctgattcattcgccttttgagggacatctggtagttccagtttggagcacttctgaataaagctgttataatctttgacatatagatgtttgtgtgagcataagtgtaaatactaatgtgactgctgtatcatatgctaaatgtatgtttaacattataagaaactaccacactcttttttaccatagttacagtgttttgcactctcagcaacagtatttgagaatttttgtgttctgtttcttgatctgtatttctaactgaaatattctttatcactatagactccttcccttatattggataattgttttttttttctttttctttttttatgagccagagtctcgctctgttgcccaggctggcttgctagtggtgagatcttggctcactgtaacctctgcctccctggttcaagtgattctcctgcctcagcctcccaagtaattgggattacaggcacctgccaccacacccagctgattttgtattttgttttttttgagatgaagtcttgcactgtcacccaggctggtgtgcagtggcatgatctcggctcactgcaacctccgcctcccaggttcaagcgattctcctgccttagcctcccgagtagctgggattacaggcacccgccaccatgcctggctaattttttgtatttttagtagagacgggttttcaccatgttggccaggttggtctcgaactcctgacctcaaatgatccacctgccttggcctcccaaagtgctgggattacaggcatgagccactgcgcctggcatgaataattgccttttttctctccaacattccatgagattatagaaccctttcattacgttatagacctgtagtagtgcctgggaactctaggatgtgttcttcccagaacacacagaattgtccttgaatagacaagtaaataagagaagacatgaggcaaggcatgaagaaacaaaggaaactgtgaagtaaggataagtaaaagcaacttagtatcctatttgaaagggatagagagagctaaagagcaattggagaggcatataggatcatagatttagtatggaggtgcttttgtttctatgtgtaaggaagttatagggaaaccacagatcactggtttctaggcatgtaccactagggtggtatgaagggttgattacagagaaacaggacaagggtatttaggagtgacagaagtatgacggtgggtggatacatgatttgtgtccttataagtcaaagtttcttttgttttttctcctgtttttcattcacctggtttttattgagtgctttcattacctagtttttattgagtgctagacatcacaaagaaaagttataaggtttcagtccttggataacattatacaaaatccaataaagatttaagtttgctatggcaagcagtcttgaatcaccataatccaaatttttgaaatttgagctgattcaaagatgattcagacttcagactctgtccagattggtctactgtttctcctttattcctcagtatagctctcagggttcccaacccaaagtataaagaattcatggcaggccctatcctccagttattgttgcccagccctgtgacacagtccaaaacactgtttagtttctccccctcttagctttttctagaatcataagacttctctaagtggaaatgtggacccagatgttgggcttatctctttgattttcatatttttcaatttttagccacccactctttattatgtaaacgctccagtggcttcactcaggtgccttttataatttgcttaatttgtataattgctatcatctagaaggttggtctaaattacctaaattaccagaaattaatgtttaagatttaggggctgataattaaattaagacctgaagaatgaggaagagtgtttgtatagtctcatccagagcagtccaaagaaatggaataggctctggctagcttttaattgaaaaaggtctgtgactttttcagagttgaaaggaagctagtttttctggcaaataaggagcgaagctgagaaggctcaacagatacataagcaaggagaagaccatggaaggggaaataagtcaaagtcattgaagagtttggattttatattaatatggaagctactaaaaagtattaagcagataaagaaaatcattatctgaatctgaatcagttgataggaaggattaaaattacagatctccaggatctttttctgattcactagcagttagtctggtgtaatgttggacagctataattttaacatgctccccaggtgattttgatccccaccaaggcttgagaactactcactttaaaattgttcttaatctcttcccttatcttctcaagtgagttttcattattctctaatctctcagatgcccctttcatatattaatatatgagatccttcttagctaattttttttaaaattctagataggaacattactgtaccatgaaatcagtgtagtggggtttgtctgcatgtgtatgagacagagaaattgaaaaaagtagaaatattgcagaatagaatagaaagcagggaagatactgttttatgaaactgtatatatatagtaggttgtgatgtgaaaggtaggtattatatgtcataataatcaatatttgaaacaaactcatgtatgtctgttatttcttatgggcattattttcctattatttgtcttttctatagaagttatatttctcaatttttttattctctcttatctttcagacttgccttcaaggtgtgcaagtaaggacttatctccagaaaagaacacttatgaaacagaattatcccaatgggaaatgagtgacagacttgaaaactgtgatcttgaagagtccaattccagggattatttggaagccaaaggcaagatggagaagcaacaagaaaatcagaaggaatatttcaggcaagggatgatcatatatgacaaaatgtccattttcaaccagcatacttacttatctcaacattcaagatgtcattctactgagaaaccctataaatgtaaggaatgtgggaaagccttcagacgagcctcacacctaacacaacatcaaagtattcatactggtgaaaaaccctatgaatgtaagcaatgcgggaaggcctttagtcgtgattcacaactcagtcttcatcagagacttcatactggtgagaaaccctatgcatgtaaggaatgtgggaaggcctttactcaaagctcacaacttattttacatcatagaattcatactggtgaaaaaccatataaatgtgaagaatgtgggaaagcctttattcgtagctcacaacttacccgacatcaaaaagttcatactggtgagaaaccttatgaatgtaaagaatgtgggaaggcctttactcagaattcacaacttacactacaccagagacttcatactggtgaaaagctctatgaatgtaaagaatgtaggaaggtctttactcagctctcacaacttattctgcataagagaattcataccggtgagaaaccctatgaatgtaaggaatgtggaaaagcttttatttgtggctcacagctttctcaacatcagaaaattcataatggggaaaaaccatatgaatgtaaggaatgtggaagggcctttattcggggctcactactgatgcaacatcagaggattcatactggtgaaaaaccctataaatgtgaagaatgtgggaaggcctttatccgtggctcacaacttactcaacaccagagaattcacaccaatgaaaagccctatgaatgtaaggaatgtggaaagatgtttagtcatggctcacaacttactcaacatcagagaatacacactggtgagaaaccctatcaatgtaaggaatgtggaaaagcgtttaatcgtggctcactccttacacgacaccagaggattcatactggtgagaaaccctatgaatgtaaagaatgtggaaaaacctttagtcgtggctcagaacttactcaacatgagcgaattcacacaggtgagaaaccctatgaatgtaaggaatgtgggaaatcttttattcgtggttcccagcttactcaacatcagagaatccatactggtgagaaaccttatgaatgtaaagaatgtagaatggcctttactcagagttcacatctttcccaacatcaaagacttcacactggtgagaaaccctatgtgtgtaatgaatgtggaaaggcctttgcgcgtggcttactacttatacaacatcagagaattcatactggtgagaaaccatatcaatgtaaggaatgtgggaaagcctttattcgtggttcacagttgactcaacatcagcgaattcacactggagaaaaaccctatgaatgcaaggagtgtggcaaggcctttagtcatggctctcagcttactctacatcagagaatccatactggtgagaagccctatgaatgcagagaatgtagaaaggcctttactcagagttcacatctttctcggcatcagagaattcatactggtgagaaaccatatcaatgtaaggaatgtgggaaggcctttactcgtggttcacagctaactcaacatcagagaattcatatcagtgagaaatcttttgaatataaggaatgtgggattgactttagtcatggctcacaagtttacatgtgaattgtctgattatttgagatcactatgaagaggttctctggttgttagcagcaaagaattctcacaaatgtgaatatgggcgcacatttgcctcataaagcacagcatcagataatttatgtgagagaaaatggtagtgtcattcatatagaaaaacatcattactggaaacctattaaacattagcaaattggagaatagttttaatatagtaaatgtaggaagccctttagccatattgaaaacaaatatctttttcaacgttatcttagctctactagttgatctttttgttatatgtatcatgatacttaacctctaccttggtttaatcattttaagatagacctaagtatattacctttattgtaagattcttggaagtattatgtaagttattacatgtaaaagctcttagaatggtgccttgaacgtagcataccacaaatattagctaccattttcactagtgttattttagagaatttgcatgagaggagagtacttatgagtataatgaatattgagaaatcttttatcaacacatccaagatgacttggttggggggcactgtatgccataatgaatgtgagaaagctgtcatttaaatctcatccattattgctataagaggaaattcatactgttaaaaaaaaaaaaacccagtggatataatcagtgtattattaaaaaaaaaaaaacccagtggatgtaatcagtgtattattgagcacagctgttagagaagtgggacaaggtgtgaagtgatttttaacgaagtctaagatccaaagtctaataaatctaggaattttttaaaaacttgaatgtattgcttttgaagtaaacaaaataactgatattacagactattttgcaatgaaaaatgatgagagtttgtgatacagactgcttttttcctaccctatatctattttctcttttttagtaacaaatttctgggctgaaaatctcagccttccttgcaggtcaacaagatagaagtgatatttatatgagtaggagatttacgaaatccatttttcctgtctttttttccgtgcctacaatgtggacatctaagctggagctccgttactctcatggggactttgagaatggtatctgggtgttatggatcatggagcagaaatacagaaggagtctgcaaccctgatgactttgtggaacagccatactagctctggtctgcttgcctcctgtttctctttaaataaaattaaacatcttatttgttgatgctattgtagttctgttattgacaataaaaattcttaaggatataaaattttgtacctggaagtgggatgctatgggtaaaagaaatctcaaatggggtattgacttagggccattgagaatgaggaactgcccaaattaagctaggaatttgaagattcttgttttaataggcaggatgttttgtcactgcctcccactcttacaagcatgctttatatcagttgatgctataatgttagaggaaatgctagaagtgattcagaatatgtgtgttgcatgtttcttgctgctttcagtaatgtcttgtgaacgagataaatttagagtagagctaggcagcccactagcagcaattgaaagcaatattgctttggtaagatgttatctatgatggcaagccctcaatcctccacccttaatccacttacagtgatttaatgtgacaacctgaacaagaaatcagaccactgccaatgcatacaaaggcagtctgctagtaaatatggttatgttttcctcacaggagcctattgttctaaaagtagtcagttattaggtacttaatatattccagccactatcttaggtgttttggatatttgtcagtgaacaattctaacaggaggagataatcatacacacagagtatgttagaatataagtgttatggggaaaaagtcattgaaaagacaatgggagggatatgatcatttagattgctttgtgaaatacagtgatcaaggtagaccatcaagaaggatagacttgagccaagacttgaaggagtgtggtgattccaggcagaggagagaggtcctacaatgggactacactgaagtgttttaggaaaagtggagaagttattgaagaacactgtgcaaagggatggttgctagagcagaactgagagataacagagagctatgtcttgccaagcgtgcaagccattggaaagatactttattttgagggaaacacaactgttgaaaaaaatcgatgaggaggttgtagtaactcagatgaaagaggatgtcatggcttcggaagaagaggtaacaatgggtatagtggttattggttgtattctaggtatatagtaaatgtgacagcaagcaagatttgtttaagggctagatgtaaaagagacaagtctagggtgactttaagtcaaagattttagtcttgagcatctgggaatacaatgttttcatcaaccaggatggagaaaacttcagttccagggttttaggggaagattgagagttcaactttgaacatgttgaatctgtagatgtcttttaagacacaaaatggcagtagtgagtaggcacttcatgtatgagatatacctaacttggtattatattactttagtaggtattgcccatatttatttaaatgattagggttttagtatagaaaaggtaaagaacagcaaggactgaaccacggagcactccaacattaagagttcaatgataaaagaacaacatgaaagaagctaaaggccaggtgcagtggctcacacctgtaatcccagcactttgggaggctgaggcgggcgtatcacgaggtcaggagattgagaccatcctggccaacacggtgaaaccccgtctctactaaaaaaaaatacaaaaaattagccaggcgtggtggcgggcgcctgtagtcccagctactcgggaggctgaggcaggagaatggcgtgaacccaggaggtggagcttgcagtgagccgagatcgcgccactgcactccagcctgggtgacagagtgacagtgtctcaaaaaagaaaaagaaaaaaagctaaggaggagaaccaataatagaggaaaaccaagaaactggaatcacaaaagccaaataaaagtgaattgaaggagaatcaacaggtatcagatagctttggcagactgattatacaacacgaggtttgaaacggccattgaatttatcagtatccgtgtcagtaactttgagaagagcacagggttttttttctttgtttatttctggtgtattgactttggagtgatagaagcaaaagcttgaaaagatagttgaggatgagtacagagaacactgcatgagggacacagcaagccacaggcacatctgttagcccagcctccaggtaacagtggaaaccctgcaggagagtcacatgcacaccctcagatcagtctgagggaaggatcccatgttgtatcctttgctcctgaagttttctcagcctggtcagcttcctcaacacctagaatccctggaacttctgcttgacctcctgaaggaaataggccagagcctaaactcaatgcacagctgcagagttcctggatccaatgctgcaaggacccatccagggcaaccacagaggtcattgagatgcaaattcactgctagtgccatgtacgtgtgcaattggaggatcagtttgaacttccagacaccaggctcacacagatgcaaagagaagggtggagctggtgccagaaaaagagctggctgctatcttcccttactcaggtctgaataaccacaactgggtctccttggacactctattaaaggacaaaattagggcttaaggtatgccctctggactcccctttaaatcagaggcaaacagcaaataatgcaaactctaaaatacccaaacaggaactataatggaaaaaaaatcacaagctgagggtcaaacagaaatacaggaataggttaaatagaagaactgcagacctgaaaaggcttgacgccagtgcagtcacaaagggaaaaaagtacatatcactcaagaaggaaaagaaaaatgtcgatgaaattaaacacaatgtttattagaacgacaagactggctataactggataatcatcttgtgaatagtgaagccatctgaataggcacagacagagttagcttgttggtaaaagtaatggaaacccacaactccataataatcacacctgcccaatcattaacaaataaatgtggagaaagcagcactatagaaatggatccccaagaatgttggccctgatgaactggaaaattatttttgttgataagattgagcctgacaaaaatctagacccatcagaaatagggaagacaaaaaaagacggcggtcatggaacaggctagagctcacccatgataaatcacagccaactaccatatggaactgggaacaaatgcaaaatgaagactatttcactagacaccacacatagacacacaaaaagacaaaattacattcacacacacagacatacaacagtgacacagaaacacacactcaggcagctcctgaggctgcagggttctgctgtctgtgatgaagtccctttaggaaaagagcagccttgagacacaggccagtcctcaaggtgacaagagggacaacttttggggagactcacccgcacactgtctaggcgggcctgaggctgggatcccgtggtgaatttctggggctccccttgatgtttcttcagccctccatgatgcctaggatcccaagaccatcctgttgaacccctggagaagacaaaccagagcccaaggccaatgaactgccacagagggctcctgctccggtggtggaggaaaagaggttgcacgggacagaaggcccgtcctagccatcctgtcctcaacccccacttcactggacttcttcctgagttcctggtggaggaagagcttcagggcaggagattggtactccttactcctctttggatctgattctggattggatgctgtgggcagaaattgggtcagatgggggtgaaaataaaatcagtgaggtgtggaaggggctgctggggcacatagacacctgagttccccagggaaggtatcagcgaaaaattcactgacccatgagcccacttcctcccttcaacctggccctagcagggccctgccctggcctcaaagcccaggggctcccgcttgtcaccactgtccaggaaatgtggaaatgaggtcaaatgcaaggtggggctaaggcaaccacacctggaactatcattccacaggggcagatgggttgggagtgtgtctctgaggcagctggggtaattccaggacagacagtagtgtccaggcatgctatcaaggggcactgaggacccccaagaaagcaaagaagaatcaaaggactcctgagactaaaaaagggcctgtgctggagtccaagccacctttggggattcctgccagaagacccacgaggtttctgcaaagtgtacccatgctcaactccaacacgggggacccctaacacagcctcacctgtatccagccaatccccagtcccttttattcaattaaaaaaataagtggcagccaaaggattcagtgctggaaagcagtctcatccaggaacaggggagttagatatccctcaagagtgagaaaatggaaacaaaatgcaagacaacctcaattagaaggcaaaggccagccatgggtgtctacctctcatcctgtgtgaatcacgcagccatctgattggatattgtgagcaattgtctttttgttttttgtttttgtttgttcgtttggtttttggtgaaagctatgaaaacctagagctccatgatcatcacacctgcccaataattaaagatgtgtggagaaggaaacactcatgaaatggaccccccagaatattgtccttggtgaactgggaaatattttttgttgataagattgagccagaccaaaaaaatctaggcccatcaaaaatatggaagacaataaaagatagagggcatagtaagagaacagaggcaatgttggggaaattactaccactgccatgtggatgcaggaatgagtgcaaaactcgtgacctagccagaaaggctgcagtttgatttaaagagattgttcacacgttattgtgttcttctcaatattgaatcatggtgagttttcatgcgactattaagggaaaggaagaatggagttacaagcatcttctttgacatctgactacaccactcctgctcatggaaaacgtgttcctgtgaggtttctgttgttggatgtggtatcgtcaccttattttagaaaagttggcctctccagagacaaggctatttttattcctcctggtgccaagcaggcccccacctcgcccaggccttaacaaaacacaagctggaaccacacagaaaacagattacacacagcccaagcagaaacacaaggagaggtaaaccaaaaggaagcctgacgaaagaaaccccctccagtgcacaaggcacatttgtcccactagataccacaaagagaagacacacacacaaacacatcccacacaaatacacacacagatatacaacacttacaaagtgctgaccagctacagccagtttggaccaataagtatcggtttatgccagttctaatttttcatcgctggttctgactggtttagaatggcttcaactggccagaacctatttagtgagactatagtgaatttgaccagcttggacctgttttgactggccaaaatcagtttatgccagttctggtctttgttggttttgaccagattagactcatttcaactggccacaactgttttatgcccagtaaaaatggcctcaacaggttttgaccactttcttatatcatctatatccttatgtaacccttgttattttttatgagagacttcttaccaaatgagggacacaagaaatattagaacttgagcacacaaacaagaaccactcataacctacaggagaattatcattattgtagatgaaagaggaccttccacattttcccttagaccttagaatctttttcagtctttcagtgtacaattttgagcacgtgtttttactggttttcacaatctggaattgttttatgccaattgtgatcagtctaagttggttctgaccagcttagaccagttccaactggtcaaaactggtttgtactgggtattactggccttgaccagcctgaaccagttttgattgggcaaaatcagttcatgcctattccaaatggtcttgccatttctgaccagtttagatcagttcctctggccaaaaatgactgatactggctctgactggctacaactggcttgaacaaataagcaccaatttatgccacttctaatttgtcatagctggttccaaccaacttagaatggtttcagctggctacaaccactttagaggggcttataattagccttgaccagcttgcacctgttttgaccagccaaaatctgcatatgccagttctgactactcttggccagttccgaaaggtttacactgatttcaactggccacgatcagtatagatggagtataacaagcatcaacaggttttgatcacttcaatgtagaatctatagcatcacataggccttgttagtttctttttgacatatttcttacaaaatcagagacaactagacacacaagcaagaaacactcaaaaccctttgaagaaagtttcactattgtagattaaaggagaccttcaatgttcccttagacttagaatactttccctctttcattgtgaaaccagcccaattttccaacaagctggatgtccataaaactgaagcttgagaaacttacatttgtacaatgaaatacatttgctgcttgttgaccaactcctttccccctgtttttattcggggctatataaacccttaactttagtcaaggaggagggatgaatttgaggtttggctgccatctcacaggctgatgtcacctgtgcaatagtaagcctgcctccctggcaatactcaactcactgattggctttttgtgtattgaccagtgggacccaaacataacccctggtgtttggtaacaattgtacaattttgagcactggttttgactagttttataagccagaaacttttttttttttttttagatggagtctcacactgttgcctaggcttgagtgcagtggcgcaatctcggctcactgcaacctctgcctcccaggttcaaacgattctccttgcctcagcctcccaagtagctggaattacaggtgcacaccaccatgcccagctaatttttttgtatttttagtagggaaggggtttcactatgttggccaggctggactcgaactcctgacctcttgattcacccgcctcagcctcccaaaatgctggaaatacaggcatgagccaccatgcctggccaagccagaaacattttatgccaggtgtgactagtcttggctggttccaatcagtttgggtcaatttcaactgactgcaaacggttaagactggctctgagtggctgcaaccagtttgaaatgaccataattggttaatgctggttctgactggtcatgtctggttccaaatggtgtagattggtttcaactgcccaaaatctgtgtagctagtgtaaaaggaaaataaatatcaggaccccaaaatcactaaaccaaaggaaaaagtcaagctgagaactgcatcaggcaaaccctgtctcccattttatttctaaatacgatagctacaaagataaaaaactattatacatacctccctcacaatttgtccacaagaaaatttcttgtgggcctcaagatctttaccctaaaacagtgctgttgaatttaaccctggtaaggtaacttgatagtttatcttcacaggtgtgagacaaagaacagaactcaatcatccctctgctcacctgagacaaatgcacatctgattgctttctctgccctattgtttatgtaaaaattcagattcactaagccagactaaggattcagtaaaaggctaatcagagactcaaaagaatgcaacaacttgcctcttagctacctatgacctggaagcccccacttcaagttgtcctgtatttccagactgaaccaatgtataccttacacatactgactgatgtctcatgtctccctaaaatgtataaaaccaagctgtgccccaaaaaccttgggcacatgtcatcaggacctcctgaggctgtgtcatggggtgtccttaaccttggcaaaataaactttctgaattgattgagacctgtctcagatactttgggttcacaacaggctacatctggccttgactggcttggactggttttgactggccacaattggtttatgtcagttttgactggtcttggccatttccaacaagtttacaccagtttcacctgaccacaaacggttcagactggctctgtctggctactatcagttttgacagactgaaattactttattctctttctgatttgttatggctagctttgaccagcttttaccagtttcaactggccatgactggtttggatgagctataactggcattaaccactttgagaaccccttgagactttttcatttcagctattgtactccagaatttttttgttttctatttctttattgatatatctattttgttcatacaatgtgttctagccagttactgcccaaagaagtctacagtcaatgctattcctatcaaaatactgtcatttttcacagaaataaaagaaactactctaaaatttatacagaatcaaaaaggagtccaaataaccaaagcaattctaaacagaaagaacaaagctggaggcatcacattacccaacttcaaactactataaagctacagtaaccaaaacagcatggcactggtaattaataaataaacaaataaaaaataaataaaacaaaacccacaaacccacatacaccaatggaacagaatagagaaccaagatataaagccacatacctacagtcatctgatctttggcaaagttgacaaaaataagcaaagcagaaagaattccctattcaataaacaatgctgggataactggctagacacatgccaaagaatgaaactggactctgacctttcaaaatataaaaaaattaatttgaggtggactaaagattaaatgtaagacctcaggccaggcgcagtggctcacagctgtaatccaagcactttgggaggccaaggcgggccaatcacctgaggtcaggtgttcgagaccagcctggccaacatggtgaaacgccgtctctactaaaaacacaaaaattagcctggcatgacggcaggcacctgtaatcccagctactcaggaggctgaggcaggagaatggtttgaatctaggatcagaagttgcagtgagccaagatcatgccaccgcactccagcctgggtgacagggtgagactctgtctcaaaaagaaaaaaaaaaaaaagacctcaaactataaaaatcttagaagaaaacctaggaaatacccttctcaacactggctttggcaaagaacttatggctaagtcctcaaaagcaactgcaacaaaaacaaaaattgacaaatgggacttaatgaaactaaagatcttctgcatagcaaaagaaattattaacaaagtaaacaggcaacctacagaatgagagaaaatattcacaaactatgcatctaacaaaggtctaacattcagaatctataaggaacctaaacaaatcaaacaaaaaacaaatcaatttaaaaacgggcaaaggacagacacttctcaaaagaagacatacgagtgtccaacaaacatgaaaaaatgctcagcattcctaatcatcagagaaatgcaaatcaaaaccacaatgagataccatctcacaccagtcagaatggagactgtaaaaaagtaacaggtgatgacaaggctgtggagaaaagggaatgcgtatacactgttagcgggaatgtaaatttagttcagccactgtggaaagcagtttggagatttctcaaagaacctagaactaccatttgacctgacaaccccattcctgggtatatacacaaaggaaaaatatatcgctctaccaaaagacacatgcactcatatgttcattgtgaatagcattgcagtgctattcacaatggcaaagacaaggaatcaacctaggtgcccatcaatggtgaactggataaagaaaacgtgttacatacataccatggaatactacacagccacaacaaagagtgaagtcatgtcattgatccagttggaggccattatcctaagctaattaacgtggcaaccgaaaaccaaataccacatgttttcacttataagtgggagctaagcattgagtgcacctggacataaagatgggaacaatagtcactggggatgactagaggagggagagagaaaggaggatgtgggctgaaaaacgacctgttgggtagtatacttactacctgagtgacaggatcatgtgtaccccaaacctcagcatcacgcaacatactcatctagcaaacgtgcacatgtacccactcaatccaaaataaaacttgggaaaaaaaagagaaaagcaactaaatgagtttttttgtagaaaacaaataattgggtcttatttttatatgcactttgacactttgacagtgtcttttagtgattgttgcatgtttctttttatgtacaatttgcatgcaacgaaatgcatacataaatcttaagtgtaccatttgctgttttgacaaatgcataacatgttgaatatttatgtttagcaaacctgttcagcatcaagctcctgccccaacacttcccagtctgcgcacggccactttgctggctgtaaccctttataaagtctccttgttttttaaatttaaatagtgtgtggccaggcatggtggctcatgcctgtaatcccagcatgtggggaggccagggtgggtggatcatttgaggtcaggagttcaagaccagcctggccaacatggtgaaaccccatctctattaaaaatacaaaaaaaattagccagacctggtggcatgcacctgtaatcccagctacttgggaagctgaggcaggagaatcacttgaacccgagaggtagaggttgcagtgagccgagatcacaccactgcactccagcctgggcgacagagtgagactccatctcaaaaaaaaaaaaaaaaacaaaacaaaacaacaactgtagtttttcttaaagttaacatatccatatcagtacttagtggcccatgaagggaaggtaaaaagggtagctccatttggtcctacctaattaatgtttcctctgtcttagcttgggctgccataacaaaattgcatatactcagtggcttaacaaaatggaacacaaatgaattttcttaacaacaaaaattaattttctcacagttctggaagctggaaagtccaaggtaaggtgccagcatggtccgcttttggtgagggctgccttcttgctacgtcctcatacggcttttcctaggtgcaggagacagagagagcgagcgagcctctcttcctatttttgtaagaccaccaattctaccagatgaggatcccacccttatgaacttaattaacttcaattacctcctaaaagctctatctccaaaatagccacattgagggttagagcttcaacctctgaattttggggggacacagtttagttcatagcaccctccaaaggatactcctctcctttgacatgtgtgatgttatccacaaccatcaaggggtggatagcgttcctgattataaaacttcagcatccaaaagcttggagctacccttggttctggaagcttccttacttttactttgaagttttcagttcccattgggagagaccctcatcccaactgtagatgaatcatttttcttcttggccaagctggagactgcatggaatcacttttattcttctgcaatatcattccaaagtcaggagagacagctttaaattacagcacctggctgagacctgggaagcttgccccatattcccgacattcctcactgtggccttccattgagtgactgcagctgactgccaattcccagaaccataagcttatgtttacaatcaaggactcttccacctgccttacacacaaactcagcagactcattttaattttttttagttacttttttttttttttagatggagtctcgctgtgtagcccaggctggagtgcagtggtgggatctcagctaactgcaacctctacctcccaagttcaagcaattctcctgcctcagcctcccgagtaactaggactacagtgtgtgccaccacgcccagctaattttgtgtgtgtgtgtgtgtgtgtgtgtgtgtgtgtgtatttttagtagagacggggtttcaccgtgttagccaggatggcttcaatctcctgatctcgtgatctgcccgcctcggcctcccagagggctgggattataggcatgagccaccgcacccagcccattttaatttattttacctcctacaggtggtcctgacacatacacactgaacaaacatgcgtgtgacatatgaaccatgttcactttggggtagagacacaacatttaaatttattacaattaggtcctattatatcaaaaggtcttttcaggtcaggaagccacacaagtgcgcagtgtgtgtatactagccaggaccagtctgtgctcagtggtcttttcatcaggagaaagttactgaagttagtctcttgtccagtcaaagctatagttatagctggtggaatagtgggtggaggtcagtcatcatctggtggagctgcaaattgttttaatattgtttatgttgaggccagtgcttgtttagctgccagagaggaaaaaaaaaaaaaccttgtggcagttagaggcagttagaacatactttattctttttatttatttatttatttatttttgagatggactttcacctcaccataacctctgccttctgggttcaagcaattctcctgcctcagcctcctgagtagctgggattacaggcatgcgccaccacacccagctaattttgtatttttaatagagatggggtttcaccatattggtcaggctggtctcgaactcctgacctcaggtgatcctcccgccttggcctcccaaagtactgggattacaggcgtgagccactgtgcctggccagaaaagaatttattccttaagtgtagggggatgtgacctatcccttgcctggcatggctttgcgtccagcttatgtcttattgccacaaagcatctgttctgtcaatcttatgatctctgttttaacattcatgttggtcagttgttatatttaaaccacaaaagagaggggtataatgaggcctgtctaaccttccatcctgtcatggctgggaactaagtatttaagagttttctgggggctgggcgcggtggctttacacctgtaatcccagcactttgggaggccgaggcagccagatcaccagaggtcgggagttcaagaccagcctgaccaacatggagaaaccccgtctctactaaaaatacaaaattagctgggcgtggtggcgcatgcctgtagtcccagctactcgggaggctgaggcaggagaatcccttgaacctcggaggcagaggtttcagtgagccgagattgtgccactgcactccagcctgggcaacgagcaaaactctgtctcaaaaacaaaaaaaaggagttttctggggtccccttggccacaagggggtccattcagttggggagtggcttaggattttaagtttataaatcttagggaaagactcccaggagaataagtgaagacataaagccatatcatggaaagatttaagtgttcatcactgttataataggcacagttataatattaaaataatgataataatgatgatgttaacaatgtcctcctcctatggggcggggatgcaggaatagccagccttctcaggagaagtattatggctacactattactactgtattactttataactacagcatgattacactataaccaagcctgggagtgatcacactaatgatggcctttcaggtgcagcactgcataggggttaatggaatggactctttagttggccagcccaggtttgaatttccctgtgctttttaaaagttttgtgatcttggaaaattcctttattcctctgtgacacattctttgtgtgggaaacgagtataataattgtgctcatctcaagcattaggaggactgaatgaacctagaacatggcctggtgcacattaaacacttaactaaaatttgctgtcatcattattgtcatcacaatcagcactgtgtactgggtaccacatcatttatgcttcacaaataccttataatgtgcggactatttccctctgggttacgagattgtcattagtcaacagtggtatcaattgcaatgataatggtaatataaatgcaaatgaccacaatgtcagtgtggtagccagcctccaagattgccctcaatcaatcttatctcctggtattcaaactccatagagtcttctttcacgataaatagactgaccactgtaaccaatactttcactatgtggtgaacacactcaagtattcttatggtgggttccatgtggtgagaaactgaggcctttcaccttctgctcatagtcacgtgagcttagaatcagatccaattagccccagttagccttcagatgactgcaattctagccaacatcctgattgcaacctcatgagagttcctgagccagaaccacctagctaaactgtgcctagatttccagtcctcagagagtatgtaggagaataagtgtttattattatgtcacgccactaagttttgagtaatatgttacacatagcgatagataattaatatggttgtcctagtctgtttgggatgctataacaaaatgcctaggctgggggatttattaagaagccaaatttattgctcacagttctgatggctgaaaagtccaagatcaagatgccaacacattcagcgtctggtgagagttgtctgcttctcagatggtgactacttgccgtgttctcgcatggcagaaaggaaaagaaactcccttggccctcttttgtaaggccatgaattgcattcctgaaagcaaagccctcatgacctaatcacctaccaaagactccatctcttaatattatctcagtgggaaactgatttcaatatgtaaatgtggtgggggaaggcacaaatttagaccattgcagcagtcgacgctgtattgtaaatgtgcccattttccgcaatataatagaacacaccatgggttttcaggattggcatttattataggcacaaacttaatataactcaaatgattgtactaatgtgcttcttatattgtcctatttcacaaatgtaaacagagagcacaattttttgttttaatagcagcattccttgttataataaatattaaaataacaccataataaaatcactaaggatgtaacctaattgtgctgatttcacagagggtggaaaacatcagcccaggggtgggactactgtgtttatataatacaaacacctgaaggtggcagaaactagcagagacagaggatttcttagcatcagaattgatatgttgttatttatgatatcttaataatttagaggcatataataatgacaaggattctgatatttgttataaagtataattgtgttgattatatttaaaaccattaatagaaacaatataattatagaattaagtaaaactgtaagtggtatgctatggcatggtgtacggtatggtacggtatgaggaatgtggagtagagtgtggtggggaggtgtaggatataccataaatagtcacactgggttgggcgaggtggctcaggcctgtaatcccaatgctttgggtggccgaggtgggcaaatcgtgaggtcaggagattgagaccatcctggccaacatggtgaaaccccatctctactaaaaatacaaaaaattagctgggtgtggtggtgggtgcctgtaatcgcagctactcggaggctgaggcaggagaatcacttgaacccgggaggcagaggttgcagtgagccaagatcacaccactgcactccagcctggcaacagagtgagactccatctcaaaaaaaataaaaataaaaaatagtcacattggcactagtagcccatttgagagctgagggtggagggtgtgattcatcctggcattatgggaagtgtccatgacaaccttggctttaagctgactttggccacggggtcaatgtctgccacactgcatcacatccattatccaacaaggtgcctgagccccagaaccctcagccctgccacattcctcttgctcctggggttctatattttccagtggctgctccagtggaggaggtggggcaggtgacactgacaatggggtgcaggatagaaagtgctaggctagatgctgatgggagtggccccctgcctatggatcccccactcctgcccctttccccctctatgtgacctgccactgtgaccaggaggaggctaagttagatcttgtaaacagtgtggaatgtatgtaggtaggatactcagtttggtactgccctgacatggagttagagctgggtgtgctggaccatggtgggaggaggcattaaatcttgaattagaggacccaaacccaccccaccaacttccccacacatgttaccaatctgtgcggggcatctggtcaacctcgatattattgctattattcattcatccatttaacaagcttgtactgagcatctgctttgagctggcaccgtgctgggcgcctggtatacagcagaaacaggacagacaaagtctggttctcatgaggctgatggtccagtggggaagagggatgagaaaccaaaaaaaggaatattgaatcaggtcagatagtaatagtatttgcaatgcaaatatcatacaaaataagggagcagcaagtgagctctacagatgtgttacttcaatggcaggataagatggggatggaggcactgcaaaggtggaagaggaaagcaagatgcacgggcactggagaagcagagcactctcagaacagtcggtgcaaaggcccaaagccagagaaaagatccttgatgttaaaacagccagaattgagatgcctgacaaataaaaatgttgactaactccaactgcagactctctggcctcttttattgtagttatatctttacactacaaacattaaatgcaactacgtgaaagtagaaataaccaaaatattatgtgaaagtttgatatgtaaaatattaaaattaggtaatcatataaaataaaacatatactataaaacaggtactattatataaaatacaaactattttattgtcacaaggaatatacagtaataaatattacaatatgctatataacatactgtagacacaattttctatagtatgtaatgacaggcacatataaaattaaaatatataaatctagtttttacacttataaatcttttatcaaatgtaattcaagttatcacatggtttacctaaaatacaacagcacttttgagattcatccatgttgtagtaagtgtcaataaatcatttctttatgtctgagcagccctccatagtattggtgtacacaatttgtttaatcactcatccactgatgtacatttgtgttacttcctaatttgggcaattatacaattgctgtgaacatctgagtataggttttcatgtaaacagaatttttctttcatctagggtaaatacctaagtgtggagttgctgagtcatatgataaatgtatggttaatagtataagaagctgccaaacttttgtgcatagtggacagaccgttttacaatcctacaagcaatgcatgaaaatttccattggtctgtattcttgccaatttatggcacgttttcatttttagccattctaaaagccattctatagtagtatctcattgtggtttgatttacattttcctgataattaaagatgttgagcatcttttcatcaccttattttccatttgtttttcatagaaccatatggatgaatctcagatacatcacattaaatgaaagcactccgactcaaaaggagatatacatacacgtacaaaacacacacacacacacacacacacacaaggactccacttatacaatattatggaaaaggcagaactatagagacggaaacagactggtgattgccaagggctgggagtgggaaaagggactaaaaagggataggaaagaagttagggaagtgaggggcctgttcttcatcttgattgtggtgttgattgcatgattagatacaactgtcaaaactcagaactctacactaaaaagtgtgactattactgaatgtaaattatacctcaataaatataactttaaaaatatttcagttatgtccacacaaaaagcctgcacagatatttataacagctttcctcataattgccaaaaggaagcatccaacagtccttcagtaggtgaataaataaacatccagacgatggaacataatttggctctaaaaagaaatgcattatcaagccatgaaaagacatggaggaaactgaaatccacattactaagtgaaagaagtcaatttgaaaaggctacacactgtataatttcaactatatgatataaaagatcaaaggtaaaactatggagacagaaaaaatgttgccaggattagaggagatgaagggatgacaggcagaacacagaggatttttagggcagtgaaactactctgtgtataacagtggaaacatgccatgatccacttgctccaacaagcagaaagtacaagacacattctatggtgttacaccaaggatgaaccctaatataacctatagacttggggtggtaatgagtgtcagtggaggttcaccaattgtaacaaatatactactctgagaggaatgctgataatgtgggaggctatgcatatgtggattaggggatatatgggaaacctctgtaatttctacccaattttgctttgaacctaaaactactctaaaaaataaagccttccgtatatacgggtatatgcatatacatatacgtaagtattataatattgttacaataaatatataagagaaataatcaaaagtcatttacaataaattgtttcccttcatgaggcttgggcatacagaggatagtcagatgcttatgttgactgatgactaatattaacaggatgctgtcattgggccctgctggcttggatcccatccatcatgtgacccaaaaaaagtcacttcattctcccataatcccattttacaagtgagaaaattgaggcccagaggaggtttctgggcaggctgagggtccctaagtggatcagtgttggcaccagaatttgaaccaacatagacagctttcactgttctgctcacaccatactcatgtagtagacaggaagcccagcttgtggtctcctgagatctccagatcatccctggcccaccctgggtccatcattccattgtgccttggggggaactcagaggaaaaggtctatgaggctgggacctcatcctcatcaccatcttccagggatcatgaccatgcaaacatggagatgcaatcttgggggaagtacagtagccaagggtgactaaggaaccgcatgaagcaatgtgggaaattgggaatcagcagacattgggttaacgggacaatggggagccaagagataccatcaaaatttaatggaggggtcagacactgtgttagtgattaatgggcatcaacagacattgggctagtttttgttttttttttttttaactggggtcctagaaagaaggggacagaagaggctccaaaatacagttgggaaatgtggacattatggttcattgtaagtcaccgccattgcctgaggggaaggaagaaagttaacagcatccaccgtattgagggcattcccacatgctgtgttagggacagttagatactgctaggtgagtaacgggagataattgttcatcatcgtgagggaaaaatcaataaggaggatcacaagacatcctgctagaggtgtaataaaagtatcaggagatagaaaccattgtattgcagggggcacaccactgtcccctattctgagggttgtaataagtggtcatcacacagaatggagagtggaccttactagacattgtcacaagtgggaagaggtaacagacaccatgctggagtgaggtgattgtaaaagaggtaatgaggagatctccagaaactgtttccggaattgatgaagtgtgacacacataagagtaaggtaaaacaggaaaaatggccaggcgtcatggccctttccagccctaaacatatggttgtgttggttttcatataagttattaatctgttacatgaaagttacatccttaaggaagccagatactaagcttcaagtcagtgatgagtacgaaaaaaaaaaaaaggcaactgagttggaagaactatgacagcagaagggagatttaagttgtcccagatgaccataaaattcttacctcggaagctttcttgaaggtgatgggagttcacaagacacggtgctgggggtcaaaacacaaagtgctgagggcccgtgaggctgagagacagtcatggtagataatgaggggggtgcaagtcttggtagatgacagtggggactcaacatacattctgaggtttacgtctgtatacataaaggttttttctttttttttttgtagcatctctttcttgatagaaatactgaatgagggttggatatgaccaactgtggtagattcgaatgagaaagaaaaacacccaggagtctgttacacaatgtgttccacaacgaacaactcacataacttaggattcatcactatcaaaataactacgtattatgttgttttatcattcaatttgttggcactatacctaatccacagtaaacaggattatcgttaacttaatacgatctttcttaggaagaatttggtaacagtattctattgtagttttcatgagaaggcttttcctattcaccaaattgactcggttccttgtcagtatgaataatgacccaaggtttactggggatggtgacaatgtaggaagggtccctcgcctcattcagtgccttctcagaggccctctccagaacagccatgtgtgacattctgctgtggtcatttctatttacaataatatacatatttttctgctgcatgcgtgcaacagtgtacaatcagacccaaccctcaggggggttttctcacactgtttctctcaagcgtggctgctctgatggacgctgaacactgatttctgaacgaagcctttcccacagatgccacacttgtagggtttgtctccagtgtgtgttgtctgatgtttattcaaattggacctgtcagtaaaggccttcccacactcagcacacacgtaaggcttctctccagtgtgaattcgctgatgcacttggagctgtgattttttagtgaaagacttcccacagtcactgcactcataaggtttctctccagtatgaattctgtgatgtgtaatcaactctgacttctgtcgaaaggtcttcccacattcagaacaaatgtagggcttttctccggtatgagttttctggtgcttactgagatttgacctgccactaaaggccttcccgcactcggcacacacatagggtttctctcctgtgtgaactggctgatgcaccaggagctgagacttggaggtaaaggacttcccacagtcactgcattcataaggcttctctccagtatgaattctttgatgagtaataaagtttgacttgcggatgaaagctcttccacactcagtgcatacatagggtttctctcctgtatgaattttctgatgaacaatgagtattgatttctggttgaaggctttcccacattcgtggcattcatactgtctctctccagtgtgaattttctgatgtatattgaggtgtgacttctgagtgaaggcttttccacaagtattgcattcataaggcttctccccagtatggattctctgatgtgtaatcaagtctgacctctgggtgaaggcctttccacatttggaacatatataagatttctctcctgtatgagttttctgatgtgtaatgagatttgaccggttggtgaatgccttcccacatttattgcacatatagggcttttctcctgtgtgaattcgtttatgaacatggagttgcgacttggaggtaaacaatttcccacagtgaccacatttatgaggtttctctccagtatgaattatttgatgtgcaatcaagtgtgccttctgaatgaaggccagtccacatttcatgcatatatacgatttttctcctgtatgaattctctgatgcactgtgagtgctgacttctgagtgaaggctttcccacagtcactgcattcataaggtttctctccagtgtgaattctctgatgaataatcaactctgacctgtaggtaaaggccttcccacactcagtacatatggaagatttctctctactttgaactttcttatgtgtaacgaggttggaattattgctgaagaccttcccatattcggtacatatatagggcttcactcttgtgtgaacacgttgatgtacctgaagttgtgacttggaaatgaaggatttgccacagttactgcactcatatggtttttctccagtatgaattcttcggtgtgcaatcaaatgggtcttctggatgaaggcctgtccgcattcaatacagatgtaggatctctcgcctgtatggattttctgatgcatcttgagtgtggacttttgtgtgaatgctttgccacagtcagtgcattcatggtgtctctctccagtatgaattttctcatgtatactgagatctgagttataagagaagcctttcccacactggctgcattcatagagtttctctccggtatgaattctctgatgcctgaagagggacgacacttgaaaaaaggattttccacattcattgcatttaaagggtttctctctcatatgggttttctggtgtataataaattctggcttctgtacaaaagccttcccacattcaatgcatacatagagcttttctcctgcaagaactttcaggtgtactttgagctgtgacttctgggtgaatatcttttcaaatttggcgcattcataagctttctccccaggatacattttttgaggttgagaggatacttgtttataactgaggatttttctacattgattatggtcccataatttctctcctgttggaatacactcatggttactataggaagacattttatcatttggtaatctttttaacattctttgaaggattatttttattatgactgtataaatctaaattatgctttaaaccatttccaaatgaggcatattgatggggtcttttgggaggagaaatgatgtttgggttcacatgaattatttttctactatccttatagtcatattgcctctttgttgtcaatattttcttgatgaaagcaacatcattttgatatttattttctctgctgatagctctctatttgtcaccaatctgtcacaattattctagaataaaatagaatctcacatcactttcatcatgaccttttctttcaatttggaaagaaacctcttcagagattccgtgctataaggtctggaatctaaactccgctcaaatgagaaacaggtgattttagttcaaagaacagctagcagaggctagggggtatggtacaaatgactcatccaggctgaacacagagaaaagggtgagggtgagtaacgtgaagaggaaggcagtaacaatgttgataggaaatgttctggaaaacaattcagcagttagaggaaataaactaaatgaacagataacaccatggacagatgtggaaaaagtaaggcaaaaaacactatatataccacagcatcattcatataaactaatgatccaaactcttaattcacttacaacatgcatgaaataaaaaatgtttccatcatataaaacagtagcttatgacaggcagaaaaatgggtgtgggggaaagagaaaaaggaataaatcaaaacataaataagagagaatcctgacccagactcatgatgatagtgtgtcttaaactgaagactatgattaaactcaaacctcatcaggtaaactataaaaataaagcaatcaaaaacaacaacaaaaacgaaccctggtcaatgtggaatcactcaagcaacatcaagaaaaaaggtcaggaagggtgattaattatgttaaagacagcagaaagataatcccaaagattaagtaacagtgacccccaaagtcatcagtttatccaggcatgaaggactgggaagaagtaagaaatttcatggccactcctctgcagaaaacaaaaagagagggtgattggacagaaagctctgaggcatctcacagtaaaaaaaaaaaaagaaagaaaaaaaagaaaaaagaaaagaaataaaagtgactagcaggagtgggagtgggtgacacagagtaactttgaaagaaagcagatccgtgaatgcgtgaaggttaaagaaagactctaggactatggggaatgtaggggaaaagaagaatgttagagaaaatgagcataaccaagaaagaaagatctttttttttttttttttttttgagacggagtctcgctctgtcgcccaggctggagtgcagtggcgcgatctcggctcactgcaagctctgcctcccgggttcatgccattctcctgcctcagcctcccgagtagctgggactacaggcatccaccacggcgcccggctaattttttgtatttttaggagagacggggtttcaccgtggtcccgatctcctgacctcatgatctgcccgcctcggcctcccaaagtgctgggattacaggtgtgagccaccgcgcccggccaagaaagatctttaatgagggagactggcacatgattcagaatccacgaagccaaagaagaacacagaagtgacaaaggtcggccaggcgcagtagctcatgcctgtaatcccagcactttgggaggcctagacgggtggatcacttgaggtcaggtgttagagaccagcctggccaacatggtgaaaccctgcctctactaaaagtacaaagattagctgggcatggtggctggcaaacacctgtaatcccagttacttggatggctgaggcacgagaattgcttgaacccaggaggcgggggttgtagtgagctgggatcatgccactgcactccagcctgggcaacacagccccggctgcgacccaggctgtgacaaaaaataaatgacaaaggtcatccagggagaatgcatttagtgatctgagaggccaagggggcatcaagcaatacaaaaacattcagaactttccagaaaaagcatcttaatagtattccaagggtgttggtgtttctcaagacagctgagatttcctcccatctcccatctaccggattcacactcgcttcactcacctgggcagctctgacgtggcctctcaccctgcagtgcccatggttcctttccttgctccaacatgaccacctctgcttcaggaacttgatatcctgttcatgggaaatgataaaggtctgggtccagctaattgtgtttcagggcccaaccaataatctcttattctttgatgaggattttttcttcagaaaagtaaccataacttttcagggtaaaattctgagtgccctaaacaaataaagaatcctagacaaatcaagaacaaaatcatcacctatttaagatgcggacagcattcaccaactgagaatgaaaacactctcagtgaggcctcctttcagataccaaggtgactgtgcttacctactgagagcaggtggctgtaggtctccagcatcacatcccggtacaggtttctctgagaagggtccaggtgccgccattcctctctgctgaaatcgatagccacatccctgaaggacactgatccctgtaagggcaaattcttgttcaatgtgcacagtcagcttagagggttggagagactatatttaggaatatggaatacaggtcttgttgttttaaatttacattctctttttaaaaactcactcccatttctctaatactttattatgaaaattttcaaacataccgacaatttaaaataattatgcagtaagaaatgtatacctaccacctaggatcaatcattaacactttacttgctttatcatacatctaagccattcttttatctatccatcttgcttctttgtacatttcaaagtaagttgcagatgacaccacacttcttcctaatacttcattttttttttcttccgaaacagagtctcgctctgttgtccaggctggagtacaatggtatgatcttggctcactgcaacctccgcctcccaggttcaagagagtctcctacctcagcctcccgagtagctgggattataggaatgcaccaccatgcccggctaatttttgtatttatagtagacacggggttttgccatgttggccaggctggtcttgaactgctgacctcaggtgatccacccgctttggcctcccaaagtgctgggattatgcgtgagccaccgcgcctggcctctcttaatacttcaaaatgcaaatcatgaactagggtgtaaaacgtatcaaccttttgtaagtaacatttacatacaattaaatgcaccaatctttaatttaccatttaaagttttgacaactgtgtacacctgtataatccagaaatttcgaagaaacattttatatatatgcatattaaatatttagttttacatattttgtggaacacagaaatcccatcaagaatttctgctatttgttctgtactatagtcagccaattactcatttttcaaaactggcaattgaaataagctgtgttttagtttcctagcaactggatgaatgacctgcgatatgctttctgatcaatttaggacgagcccttatgctagccctgggaacacagaaataattatgtgtccaatcttctagcaacttaaaagacttggaaaataaatcagactgaagttttttaaaaaagaagacataacaaattcattaaggtgttgaaaagtagatgccttatggtggaacacactgagggcccaaaggaacaaaaagtacattttacttgagggagtaagttgacattccgtagagttgaggaatttaacttggaagatacaaagtgtaacccagaatatggggtgagggggacaatgcccagaaaagacaagaataaaaggtgtagagatagaaaaatacaccatgagtttagggaacagcaaacaggtttatataaatggagagaagtctgtctgatgtgtcagaaaagcagtataggaaaaacagtttggtcaaagtatggaatttttactttcagtaatggtaattaaggtaatcagatttatatgtaaattttttttaagttctgtattacacaggataaccaaacagctggtgaggaaaagttcttttttttttttttttttagacaaaagtctcactctgtcgcccaggctagagtgcagtggtgcgatctcggctcaccgcaacctccacctcccggattcaagccgttctctgcctcagactcccgagtagctgggattacaggcgcacgccaccacaccaggctaattttcgtatttttaatagagacagggtttcaccatgctggccaggatggtctcgatctcctgacctcacgatctacctgcctcggcctcccaaagtggtgggattactggcatgagctactttacctggttggaaaagttttttatagaatgattctagctaataaataaagaagttaggataaaattaaaataccaccatgtataactactaatgaaataacagatttagacaataatcattaatggctgttggaatgtttcagttgaaaggctgaagggaagcgtacaatggatagatcagctagtaacatcagcatccacaaaccagctctcatgtgcctgctgacatggcatagtaattaatttcattacactacttatgaagtattcttgccaaaaaataaaattcaaacccctatctcatcaagtctccagatctaacaagccattcacaggagtgggaaggagagtgaaacgtactgaacaatatgaagaccaagacatcagctaaattcagaaggtagcaaatggcccacttcttcaaaaaattacaagagaatggacatggaagggaatattttctttattaatagagactttagagccatactaaccaaaggcaacttgtggactttcactaattaaaatgaaccaatcttaaaaaaatatttatgacaatttagagaaatgcaaatggtgggtattagatgatatcaaggaattactgttattttgttgtgtgacattagcttactggttatgctaaacacaaaggaaaaagggaattcatatctctccgagatacatatcaaggtatttttacacaaaacatggtgtttgagatttgctttaaaataatctagctgctgaatgggaggtggtttcagataaagtaagaatggcagaatgggccaggtgtggtggctcacacctgtaatcccagcactttgggaggccgaggcaagtggattgcttgaggttgggggtttgagaccagcctggccaacatggagaaatctcatctctaccaaaaaatacaaaaattagctgggtgtggtggcacacacctataatcccagctacccaggaggctgaggcacgagaatcacttgaacccaggaggtggagattacagtgagctgaggtcgtgccactgcactccagccgaggcaacagagtgagactccatctcaaaaaaaaaaaaaaaaaaaaggcagaatgttgatgacgactgaaactgggtgacagggacaatcggtgaaagggatctttatactattatctttacttttgcatatatttaaattttttcataataaaatgctttttgaaaacaaaatacatgatcctccaaattaaaaaatctaacttggaattgcacaatgaaaggaatgcctattaccacatggagctgtatacatttaaagaaagtatgctagggacttgaatacccctccctcaccttagcaatttatcaaaatactagacaggacatcatcaaggttatagaaaaggcagctgcaacaaacaacagcagaatgcacattcttttcaagcacccatagaaaagtgagcatgacaaccataccctaggctgtgaaacaaacctcaacaagtttacaagaattacaacaatacaaagtatgttccacaagggaatcaaacaaaaattaataacagaaacaaaacagacaaaatctccaagcaaattaaaaaataacaaacaaaaacaacctaaaaaacccacaaaatatttgaaaattaacagcactcttctttaatgacccacaggtcaaacaagatatcgccaaaataatatttaaaatacacagagttctatgtatagacagtaaaaatacaacctatcaaaatctgtgggatgcaggtaaagcaaggctgagagggaaatttatagtactaaaggattacattagaaaagggaaaaagctacaaatcaataatgtaagcttgtacctcaaaaaactagaaaaagaggccagacatggtggctcactcctataatcccaacactttgggaggccaaagtgggaggattgcttgagcccaggagttcgagatcagcctgggaaacagggcaaaaccccatctccatcaataatacaaaaattagccaggtgtggtagtgtgcacttcccaaatagtggtcccagctatttgggaggctgaggcaggagaatcacttgagcctgggaaggcagaggatgtagtgagctgagatggcaccactgcactccagcctgggcaacagagccagaacctgtctcaaaaataaataaataaataaataaataaataaataaataaataaataactagaaaaagaagagcaaaagaactcaaaagcaagcagaaggaactaaataataaaaagtagaaatcaacaaaactgaaaacaaaagatagagagaaaaatcactgtaacacaatccagttattagagaacaaaataataaaaccgataaattcactgattggtctattagtcaaccagactggcaaagataaaaagacaccaatattaggaataaaacagtaaatatcattatagatgcagcagccatttaaaatacaatgagaaaaataaacactccaagctaataaattcaataacttagaaaaaaataagccaattcctcaaacatcacaaactaccaaaactcaaacctttgaaaatggataagataaaccatcttatgaccattaaattaatttaaattaataatttaaaagctcccgaaaaagaaacctctaggctagatagttctaccagagaattctttttttcttcttctttttaattttttttgtgagacacgatcttgctctgtcgtccaggctgaagagcagtggcgtgatcatcggtcactgcagcctcgaactcctgggctcaagcgatcctcctgcctcagcctcctgagtagctgccactacagacacatatcaccatacccagcttttaccaaagaattctatcgaacttacaaagaagaatgtgtcatttttacataatctcttccagaaaataaaagaggagaaacacttccaaactaatatttttaagcccagtattactccaatgtcaaaatcagacaaacacagtaacaaaaaaaaaaactacaggccaatatctctcatgaatttaaatgcaaacattcccaacaaaatgtcagcaaactgaattcaagaatcactaaaaagaatcacgtaccacaataaactggaatttatgggggaactctttgtactatattttctaactccttatgaatctgtaataatttcaaaataaaaaactgaaatatacatattacttaagaaagattattttcaaaacatacataacatttgggaatggacaagactggaagatcagagactcattgcacaattgatgagagagaatataaattgtagttgagcctgaacaacacaggtttgaactacgcaagtccacagatacatgaatttttttcaataaaagttacatatagtgtgcatgcctctcctgcctccccttccaccttctcctcctcttccgcctctgccacccgagccagcaaaaccaaactctccttttcctcctactcctcagtcagctcagatgtgaagatgacaaagataaaaacctttacgatgatccactttcacttaatgaatattgaatacaaatatcttccttttgattttcttaataacatttttttctctagcttactttattctaagaaaaaaaaagtcatgtatgagcaggtctctgaattcaggagagtgcacgagcacacaggaagaaattggagacagaaatgtattaaagatacttgtgatcattaatatctgaaagtatgattcttttttttgttttttgagatggagtttcactctgttacccaggctgcagtgcagtggcgcaatctcggctcactgcaacccctgcctcccaggttcaagcgattctcctgcctcagcttcccaagtagctgggactacaggcaccggccaacatgcctggctagtttttctatttttagttgagatggggtttcaccatgttggcaaggctggtcttgaactcctgacctcgggtcatctgcccatctgggcctcccaaagtgatgggattacaggcgtgagccaccacgcccggcctaaaagtatgattcttaaaagctacttttttaatttattcatttaattgtgttcggagattacaatttgtttctttgtgatgtgtgttgattctgtttatgaggcttacaatatcttcatttcttaaaaggaaggcttatacactgttggtgggagtgtaaattagttcaggccttatggaagacagtgtggcgattcctcaaagacctaaagacagaaataccatttgacccagcaatcctgttactggatatatacccaaaggaatataaatcattgtattataaagacacatacccacatatgttctctgcagcagtattcacaatagcaaagacatggaatcaatctaaatgcccatcagtgataaactggataaagaaaatgtggtgtctatatatacaccatggaatactatgcagccataaaagagactgagatcatgtcttttgcaggaacatggatggagctggaggtgataatccttagcaaactaatgcaggaacggaaaccaaataccacacgttctaacttataagtgggagctaaatgatgagaacacagggacacaaagaagggaacaacacacactggggccttttggaaagtggagggtgaaaggagggaaaggatcagaaaaaataactaatgggtactaggcttaatacctgggtgataaaagtctatacaataaacccccatgacacaagttaacctatataacaaacctgcccttgtacctataaacttaaaccaaaaaaaaagttccctatatacctgaaatgaagacgcatgctctagttttctcttcatcacacacttgcatattcatgccctacacacactgaacccccagcccccaaaactaatgtcatcaaaaaatttaatggggaatcaagacaatgtcatgttaggctagaatggagttttgacacctcaccaaatgatcttatacaaacagtttgtcaggaagaaatctcctcattcaaagacaataaacatctcctgatgtacaaagatgctatgagtaaaaggatgaaaaaaaaaagagaggagattaagaagaatacactagaaataaattgacatacaacagaagaaatcataacctccatgaattcaaggaatttactaaaacaattaactgcttagggaaaaacagattaagaatatagtgatataaatttctgaaaaataaattaacagaactcagtaaaaaagtaaaaaaaaaaaaagcaacacaaaaataaaagtctccctgaaaaaaatgagaagaccctgcaaaaacacaaaaggtggcaaagagcagattaaggcaagtgagcaacatgagacggaaataaagatattttttaaagaaaataagaggagtttaataaaaacatccaatgaacaaaagaatccttgaattggcagtgtagaactgttatcattattcacagtacaaatttaataaatactgtcttaaagagtagattcgaatatttagttcaagaagttaacatcataaagatgacacacacacacacacacacacaaaaacaaaaaagaatccaaacattccaaattacatggaagacacacagaaacaaagcacaaatatagagtatatagtgaaagatttataaaatagccacatcagaagcataacataaaatgcatctttccacacacacacacaaaaaagcacaagaactccaaaggatgacattaaaaagatgaccaaaggcatatctggagttgccaacagaaaagaaataagagcctcctccttaatattagatagggctgaattgcaggggaaaaaatattaaacaaggacacaatgtgaaatgagtttcggatgccgtatttactatctgtgcaccaaactacataacatcaaaatttataaacaaaaactataggaaaaaggccgggcgtggtggctcatgcctataatcccagcactttgggaggccgaagcgggtggatcacgaggtcgggagatcgagaccatcctggctagtctctaccaaaaatacaaaaaattagcagggcgtggtggcgggcgcctgtagtcccagctactcgggaggctgaggcaggagaatggcgtggacccgggaggcggagcttgcagtgagccgagattgcaccactgcactccagccggggcgacacagcaagacactgtctcaaattaaaaaaaaaagaactataggaaaatatagatagaaatacatttgtggtgggaaactttaataatatctctcagcaacttgagacaaagtagaaaaaaatgagtaatactatagaaacctcatagctatatatcttattgataagctatcaaatttttttcttttcaagtgcctatacaacaatcccaaaacaaaacaaaaaacaaagaaatacccgtaataatctctcgaaaagtaaatttctccaatgctgcaatcctaatcttattgaagttttttgcttttgttttcaagacagggtgtcactgtcacctaggctggatgtagtggcaatgtcgtggctcactgcagccttgacaggctcaagccgtcctccaatctcagcctcccaagtagctggtatcacaggtgccccaccaccacactcagttaattttggtttttgttgtagagacagggtctcactatgttgtgcaggctggtctcaaactcatgggctcaagcaatcctcccgcctcagtctcccaaagtgctggaattacaagtgtgagccaccacatatggccaaaagtaaagttaaaaaatgaaaatcttaaaacctagaaataaaatgtggtaaatggtatttaaagatttggtggggtagttaatgttctagaaattcatccttttcagctgggtgcggtggctcatgcctgtaatcccaacactttgggaggctgaggcgggtggatcacgaggtcaaagttgagaccatcctggccaacatggtgaaaccccgtgtctactaaaaaaatacaaaataattagctgggcgtggtggcgcacgcctgtactcccagctactcgctgggctgaggcaggagaattgcttgaacccgggaggcggaggttgcagagccaagatcacatcactacactctagcctgactacagagcaagactatgtctcaaaaaaaaaaaaaaagaaattcatccttttcatttagatttttttattcatttgcatgagataaattatttttctaaattatttttagtacagttttgctatataccagagcttctgatatatatataccatttttattgtttttgagatattttacaattttagttttgactttggctttggagtgggttgctgagaacatagcagttgtttcactaatcccagtaaaaacctactaggctattgttttcttctactcttcaatgcagttagttaacatatttgacttctgaatctatcttcataatttccagttctttcaggcatcaaggttaacactgtaaacaaaataaaacaaaaaccaaaagcaaggttgagaataattttaaatattattctttacccaaaacttcagcataatgaccaactataaaaatgcatgacctttccattattttttactgtgttggaaatgctgaatcaacattttaatttcttcaaggactttgaaccatttaaattcttaccaattatatctattttttgtaaacttttatccttttatttatactttcatatttttggcatgattttgtataatattcattcatgattgtttgaatcttaggtacggaactaactgtttctcctgttttgttacattcttttgtctttttttcagtcttgctccgtcgcccaggctggaatgcagtggtatgatcttggctcactgcaacctccgcctcccaggttcaagccattctcctgcctcagcctcccaagtacctgggattacagacctgcactgtggcaccctgccaatttttgtatttttagtagagatggggtttcgccatgttgactagactggtcttgaactcttggcctcaagtgaaccacccacctcagcctcccaaagtgctgggattacaggtgtgagccaccatgctgcccagtctttttttttttttttgagacagagtctcgctctcgctctgtcccccaggctggagtgcagtggcacaatctcggctcactacaacctctgcctcctgggttcaagcaattctcctgcctcagcctcctgagtaactgggactacaggtgcgcaccaccacatccggctaatttttgtagtagaaacagagttccaccacgttggccaggatggtcttggtctcctgacctcgtgatccacccatcttggcctcccaaagtgctgggattacaggtgtgagtcaccatgcccggctgcacagtctttgattatgtagatatttactccattttttgattgtcaacacatcaacttgtcaacacattttttgattgtcaacacatcaacacagcaacttgtgtttctgtcaaactcataccttaggtcttttttttttttaaacgtccaggattccaaaaagaagcaattaaatctatagtttttcccctctacccacaggatagctttagcacataaacttactttatttatttatgagacagggtctcactgtgtcacgcagactggagtacagtggcatgatcttagctcactgcaacctctacttcccaggctcaagcgatcctcccacctcagcctcctaagtagctgggactacaggcctgcaccaccacacctggctaatttttctattttttgtagagacggggtttcaccatgctgcccaggctggtcttgaactcctaagctcaagcaatccacccacttcagcctcccaaagtgctgggattacaggcatgagccactacacccagcctaccacacaaactttaaaatgcactactttatccaaatgttttgttttgttttgtttttgacatggagtctcactctgtcgcctgggctgaagtgcagtggcacaatcttggctcactgcaacctctgcctcccaggttcaagcaattatcctgcctcagcctcctgagtagctgggattacaggtgcccgccacatacccagctaattttttgtgtttttagtagagacggagtttcaccatgttggccaggctggtctcgaactcctgacctcatgattcgcccacattggcctcccaaagtggtgggattacaggcactgggcctggccccaaatgctttttaattgtggtaaaaatacacataacataaaagttgccattttaatatttttaagtgaccagtttagtgacatgaagtacattcacgttgtgtaagagccttttactttttatttttattttattttattttattttattttattttattttattttatttttgagatggagtctcgccctgtcgcccagcctggagtacaatggcacgatctcggctcactacaacctccgccttccaggttcaagtgattctcagcctcagcttcccaagtagctgggattactggtgcgtggcaccacgcacggcttattttttgtgtcttcagtatgagtcttcagtatatgagtttcaccatgttagccaggctggtctccaactcctgaccttgtgatccacccgccttggcttcccaaagtgctggggttacaggcgtgagccaccgccccagaccttactttttatttctaatttaatgctcttagaaaacagaatcagtatgatggcaaaggtttctattctttgtctgccttgagagtagtgtactaaaatggccaatggcatatttaatgatttctgttcatttttacttaatatagttcaaaaatacattattagttaaacaaatgttgataacttttataattatttgtatattcttccttttataagtatgaaccatcctcttcatccctttaagtgattttcaccttaaattccttttgacctgttcctaaattgcatccctagctttcttttggttcattcctttatttttaaatgaggataaaagcagcccctgaccgctgagagttagcctggtactatcagttaaacctcagttttgctagaagctagcctggcaggggccagctaactcatggtgttctccatggcgctacacaaaaataatctcttggaacaccaacagcaaacaagaccaatctctgaccaccatggtggaagacaaaaccaagaccactctgtcattatacttgagcacagacaaaaatcacaatcttcttcaaaccataaaaatctccttactctgcataaggaaagtgactgccaattatacctttaccaattatagcttttgcttcaatctacccttcatattttctaggtaaaaatgattaagatacccaatcataaaatttcccaataggaacagaagtagaggttcagtgaaattcagctagaagattcttattacctgtgactaaaaccagaaatgaaattctactacaacttacacatgcaacagaaaggaaagacatgagaagaatgcctactgctacatagttcataatatgagctgtattttaccaaacaaatatttaaaaagcaatgtgtgaaaatttagtctactatggcaccttttgtgaaatagaaagaaaaaaatgtgtacttgtttttacttgtttatagaactaagcaatcaaagaaaaagaataaaatcggtcctgtatgttgagaaacatgggggtaggtggggaacggaggtgggtgaatcacagatccatgtttcccctgaatttgtttcctataacacttttcagggtgtgttgcctttaaatgcatttctaattgtttttaatttttattttttactattattcccattttaccaatattatttttgaacgaagtgtatatattccctattcagaaaactaaactttcctaatacactatcacaatatctccagaggcataagaaataaaattatacccatgaaataagaacaagatgctaatcaaaaagaatatttagaaaataaattacagttattaaaaattaaaacgttgaattaaaatgttgatagtggtaacgagaaactcaaaagaagggctggaaggcaaatgtgacaaagcttcctgaaaaagagagcagcaaagaaatagaaaacagtagagggaaaaaaatggagaaccaatatccgaaaaacagaaatgtaaaaaaaaaaaaaaaagaaagaaagaaaatatttgtgtttgaggaggcagtttaggaagaaacaagagaaatactttgaaaatcccacagaaaagtgacttctaaccaggaaaatctatccacagcccaaagatcaatgtagtgtgatgacaaaataaacaacagtttttcttaatagtccacctctccactgtcgcacagatggcctccagagacgaagacattacccacatgttgctcattctcaacaggaagatcaagatttgtttcaggagcagcaggtctagagtccagctgcttcctgtggcccagctccctccctcagtcatgaggttctagtgacagaccagagatacctagtcctggattgaattcccacccccctgggactcctccttctcacctcataggagctgccatgatcctctggagccagggctgaggatttctgaggtgaggtccaattagctggcatggccacactgggtctcaaccctttttctgtagggtgtctgaagcttggcagtcatctgtgaactcaagcagagctgctctgaagagatgggctggagtctagaggaaaatctggcccaggggctccccagagacacccagaaacctggaaagacaatgttcccatagtcagtcatttcacattcaacacataagcacttcctggatatatcaaggtgcaggtccctgagctagaaaccaaagcagtggttctcaaatgggtatgcattcaagttacctggaggacctgttaaatgaaacacagttaaaaattctcagcctactccacagtttctgattcagtaggtctaaagtagaacccaaaaagtttcgtttctaactggtgcccaggaaacgctgatgctgtcagtacagggaccacactttgagaaccagcgctgaggagaacataaaatttaacaaaatctgtgataggtattagttacggtgaaatatgggaaaagtcatgagagatggagtaatgttactgcagatttgaactgcagctctgacacttttcacctatgagaacagaagtttcttcactttcttttgagacggagtctcgctctgtcgccaggctggagtgcagtggtgcgatctcggctcactgcaagctctgcctcccaggttcaagcaattctcctgcctcagcctcccaagtagctgggattacaggcatgcgccaccatgtccagctaatttttggtaaagacgaggtttcaccatgttggccaggatggtctggatctcctgacctcctgatccgctcgcctctgcctcccaaagtgctgggattacaggcgtgagccactgcgcccagccatttcttcacttttaatttcagaaatgaggatgaaaatgcttatctcaaagttacaaaaattaaatgagataatacttgtaaagtactcaacacctcccaggcacacaaaaatcatacaatacatatcagcgattaccatgcattatcagatattaaaacaatataaaaacaatgtaataaaaacaagtaaaacaataaatataccagacaatattgatctatatatgtgataaaagtggtattcaaatgagtgtgcataagacattcattgcataaatggcagtgatataatgcagtgatataactggctggccacctggaaaaaaacaaactagatctccatcacacactattcagtaggcaaatgccagcaggactgatcacttaattatgtgtatttgttaaatcacaaagactattaaaataaattttagaagtatacatgtgtataacactgtggtgggctgggagggatcttattacacgtgagaggaaacacagactctgtaacagaaaaatcagatacttttgattagatgatatttcctaactttatgttaaaatataccacaaaaaaaagtaggacaaaagatatgaaaattcacagaaaaggaaacaaatggcaattaaccaaataagatgccaactttagtaactggaaaatgcattggagcaattagatataattttccctcaaaattttaaaaacttttaaaatgcaacaatatccactgctggaaaagcatctgggaaaatgagttattttataaattgttggtataagcttgaattgttatattttgagctacttagtcatatctataaagtattaaaaatgcacatatgccgggcgcagtggctcacgcctgtaatcccagcactctgggaggcggaggcaggtagatcacctgaggtcaggagtttgagaccagcctggccaacatggtgaatccccgtctctactaaaaaatacaaaaaattagctgggcgtggtggcgggtgcctctaatcccagctactctggaggctgaggcaggagaatccgttgaacccactaggcagaggttgcagtgagctgagatcgcgccactgcactccaacttgggtgacagagcgagactccatctcaaaaaaaaaaaaagtgcacatagttattcctaataatttcacatatataaagcagaaaaagaaggacaaatggacaaataacctttccagagttgagtactttaccttcctctgtaattaagcagacaaaataatctgtgaggagacagatatattttttgaatatatgcttaattaatatctataacaatacaattagagaacatagtacactgtttctatgtaatagatgtgacattcatgaaaactgaccacgaactaggtcataaagcaatttttcaatttgaccattaaacagacattactttaaaaaggaacttctaaataactcatggatcaaagaaaaaaccacttagatttgaacaatttttaatacaaagattcaccaaaacttgagaatttttatattaaagaagactgaaaattaaaaagctgaactttcaactcaggttagaaagcaagctgattacagtcctcaccgatcaccataactgaccctacaggctctgtcactgaccacagactcccatcactgacccccaaacctcaatcactcatcccaaagagctccatcaatgacctgagaaatccgtcacaatcaacaacggacgccacagaaccccatcaccgaagcctgaaaccgcaatcactaactccacaggcaacctcgacaccccctattactggctccacagaaaccccaatcgtgatcaaccaaaatcacctcaaagatttatcggtattggaatatgaaaatactcctgacaccagcggcaaaaaagccttggaagaccacttccacttccggtccgacttctagcacctcccctttgtaggctgttgatatggcgcatgctctgaataaacttggaagccagtttcctcgaacagtcaacagggcgcagacacagcgcacaggttccgtaatgtggcgctgtccggcagagaacatggccgcgcccttatggtgtttattcgcgtgggccgccattttgaaagcatatccattccgtagagcagaggaattggccgctggcagggtttcctagagcgaggcaggtatagttacataggatgctggagtgtgacccttgtctgactaggcttctatttcggaggagaaagttactggaaatgtgggtctggtgctgtatgttatatttagaaaagctaagttacctttctgaatacaggacactgaggataataattaccagggaatagaggagccagggaaaaatcaccaagtgaaggggatcctgggagaaaccacaggcagatgataggaggaatcaggatagtacagtccattttttacagacgccattcagggaaaaggtggaaaggtcactaggggagtcatctcttgagtgaaaccaccctgaaagtctgagagacatctgaatgagtagtaggctgcaggaagagtggtacaacttttaatgggagaaaccgccttgggaaatagggtagaagtccaatagtattaatacaatcctctcctgggagataccaccagaggagggaggagaagtccgggcgtccccttctgaagggctgggtcgggtgggaaggtgaatagagatttgaatcacccattaccctccacactaaatacctcaagtgcaactatagtaggcagcaataataacaacactaatagtctttagtatggccaacgtgttactaaaagcacctaaagaagactgtttttatttaccttgaagttaaaatataattaataacaatcgccttaccatgtcaatgaagctttaagtgcagtctctgacccttagcttctcctctgtggaaattctgaaacctccttactcccctttttggagggtgtggatgaggagttgtaaagatacaattcctttcacttggtgaactcctaaacatgattcacagctcagcttctgacaggaagttctacctgaacagtggtgggaaattactacccaatgtgttcagttccagcaggtgggaaacttgttttcagggaattgaacctacactctgatgtgggcatgctggatgccttcaggccagttatgtctgtctctgggactcggcttaaaaatatgtttagagaattagactctgctgatctcaggttttctttcttctccgaaaggacggtctaaggaaacatctgtggaagtccgttagtaaacacacaatttctaccaaggggctaagaattactgttgattttgtcagtaatgcagctctgttaaaaagaagatgacttaacttttagggattcgtgtggaaatatttatgggtggaataatattagctttaaaaactccactgagaaaaaaaaaactccactgagaaggggtatatggtattgcaaaagaaaatgttgataaatgttaaagcagagtgataagtagacagaactcattataatgttctcttccatagtatttgtgtgaaattttcatagtaaatttctaatttaaaaagaaaggaattaaaaacatttacaaggaaacatcaagaagacagcaggtgtggtcatagtgttagggaagatgaaacctaggagacccagagtgacaccattttaagttcagctccatcttgacactagcaaggcacattcattgcaagtcacaactcatggtcctaatgtgtttacagcgaaggaagcagccctgtaatgcctgcaaagacaaactcctagaacaacagaaagtccagatgtccaatacccataacaataaatgctttcaagatcattatagttatactttgatgtacttactaaaatgtcagggatagttttctttaaatcaatagaataataaattttgtcataatgtcaggccacccacgcataggcacagcttactttagtctttacatagacaagacccctatataagaaaagcttaacagatgttcctccacttgctttctgaggacaccctactctgttgtggagtagctttcaataaactatctcttctcactgcactctacaacccacctggaattctttcctgcatgagatcaagaaccctctcttggagtctggattgagacccttttatttccataacaatagtattatacaaacacaggcatacctcagcgatatttagggtttggttctagaccactacaataaagcgagtcacacaatttgtttggtttcctggtgcgacatacactggggcctgttgggggtggggtggcgggagggagagcattaggaaaaatagctaatgcatcctgggcttaacacctaggtgatgggttgacaggtgcagcaaaccaccatggcacacgtttacctatgtaacaaacctgcacatcctgcacacgtaccccagaacttaaaataaaaattaaaggctgggtgcccgtggctcacgcctctaatcccagcacttggggaggccaaggcaggcggatcacgaggtcaagaggtcgagaccatcctggccaacattgtgaaactctgtctctattaaaaatacaaaaattagctgggtgtggcagtgcacacctgtagttccagctactcgggagtgtgaggcaggagaatcacttgaacccgggaggcagaggttgcagtgagttgagatcgcgccactgcactccagcctgggcgacagtgcaagactctgtctcaaaaaaataaaattaaaattaaaaaagtctattttgaaaaaaatagagaaagaaaacaacatgagaaagaaaaaggaacattactactgagagaaagatttaaaactcaagagaattctaaggatattttgagaaatccatttgaaaatgtaataaaataggaagtttcctaggaaaacacagatgaaaattgccatgtataggaagaaaatttggataggccaaaaacaataaaagaaattgaattggtagcatatgcaaaaaccaatcctatgtgtattaatgattcaaatgttaaaaacatagctttaagacttttagtaaaaatattagtaaatgtgttttagactctgtggcaatggaaagatctcttaaacagaacaccaaaaaagtattatatataaaaggttgataaaactgactatattaaaataataatttttgttcatcaagtgatagtaaagagaatgaaaaggcaaggtataaactggtgcagatacacatagaacacaggctacccgagatagcaggaatatgctttttaaaaaaccctccaaatcggctgggcgcgatctcggctcactgcaacctccgcctcccgggttcaagcgagtcttctgcctcagctgggatcacaggcgcctgcctaatttttgtatttttagtagagacggggtttcaccatgttagccaggctggttttgaactcctgacctcaggtgatccacctgccttggcctcccaaagtgctgggattacaggcgtgaaccaccgcacccagctatgcatgcatttttatgcgctgggagtgaaggtgtaggattaaccagccttctcaggaaaagcattatagctatgctataactattatactctgttataactacagcataattatatacaacactataacagagactgtgaatgatcatactagtgatgtcttttgaggggcagcattgcatgggggttggtataatggactctgtagttatctgtcctgggtttgaatctctctgtgctgttgactagctctgtgatcttgggcgagctccttcattcctctgtgactcagattattcatgtggaaaaggtgaatataataattgtagctatctcaagcattatgtaaattgaatgagtttatacatttaacgagtctagaacaggggcctagtatacattaaacacgtccctaaaatttgctgtagtcatcatcatcattatcatcatcatcacaattagcactgttgtgggtgccacatcttttttttttttttttttttttttgagacagagttttgctcttgttgcccaggctggagtgcaatggtgtggtcttggctcaccacaacctccgcctcctgggttcaagtgattctcctgcctcagcctcccgagtagctgggattacgggcatgcaccaccatgcccggctaatgttgtatttttagtagagatggggtttctccatgttggtcaggctggtctcgaactcctgacctcaggtgatctgcctgccttggcctcccaaagtgctgggattacaggcgtgagccactgcgcctggccgggtgctacatcatttcagcctcacatagaccttacaatgtgcagactattcccctctggcttacaagactgtcatcattcctaatagtggtatcaattgcaatgacaatagtaacaaatgcaagtaaccacaatgtccatgtggtagccagcctccaagattgttctcaatcaatcttacctcctcgatattcaaacttctatgtagtctcctttcacaaacaaaagtgaccactgtaaccaatacagccaccatgtggtgaagacactcaagtattcttgtggtgggttccttgtggtgagaaattgaggcctttcaccttctgctcatagtcatgtgagcgagcttggaatcggatcgaattagcttcagtcagccttcagatgactgcatttctgccatgtcaacatcctgattgcaacctcatgagagctcctgagccagaaccacccaactaaccttttagattttcagtcctcggagactatgcaagagaataagtgtttatagtcactttaagtcactaacatttgggtaatttagtgataattttctgtgatattattatggtgttaatttaatatttactataatagtggatattgctattaaaacaaactggagctgggcacagtggctcacacctatactccccgcactttggcaaaccaaggcaagaggatcacttgaggtcagaagtttaagaccagcctgggcaacataatgggactccatctctacaaacaaacaaacaaacaaaaatcagccaggcacggaggcacttgcatgaagtcctagctactcaggaggctgaggcaggaggatcatttgagcccaggagtttgaggtcgcagtgagccatgatggcaccactgcactccagcctgggcaacagagccagaccctgtttcaaaaaaaaaaaaaaaacactcagactgagggatttataaacaagagacatttattgcttatagttgtggtggctgagaggtccaagattaagatgccagaacattcagtgtctggtgacaactccctgcttcatagattgtgccatcttgctatgtcctcatacagtggaaagggcaaacaagctcccttagacgacttttataaggtactgatccaactcatgtgagcaaagtcctcatgacctaattatctgccaaaggccccacctcttaatattatcccactggggattaggctttaatatgaacttcgaagggacacagacatttagaccatagcaatagacaacactgcattataaatgggcccatttttcagagtataatagaacacaccgggttctcaggattggcatttattatagtcacaaactttatataaatgcttgtattaatgtggtgtttacattatcctatttcacagatggaaacagaaaataccagcttttttaaaatagcaatatctattattataataaatattgaaataacaccataataatatcactaaggaagtaatctaattgtgttgattttgcagagggagaaaaacattacctctagagctgaggctattgtgctcatgcaaactccaatctgaaggtggtagaaactagaagggacaggatttcttagcatcagagttcataaattattcatggtatcttaataattaaaggcatgtaacaaatagcgacaaagattgtgatattagttataaattatgataattatacttaaaaccaataatagaatcaacataaggtagaattaagtattgtagtgaataagtggtatgatatggggagtggggagtagagcaggatagggtggggtaggatataacatagataagagtcacatgggcacagtagcctcactgaagctgagggtggagggctcaattcattctgacattagggcaagtgtgcatgacaaccatggctttaacctgactttggtcacggggtcatcttctgccacaccgcatcacgttcattttccaattaagtgcctgagacccagaaccctcagccctgccacattcctcttgttccctaggttccatatttgctggtggctgctccagtgaatggggtggagcatatggcactgatgatggggaacgggattgaaagtactagggtggatgccaatggtaatagacctctgccactgggtcccttacgactgtcctccaccgacatggtatgccactgtgaccaagaggaggctgagttgggagaccttgtggaatgccagggaaggatgtaggtaggatacttgggaggagggtagcagggtggttgggcaccacccgcacatggaattagggctgggatatgctgaagcatggggtggggcattagattttgaattagaggacctggaaccaaccctaccacctcccacgcatttagccaatgtgtgtggggcatttggtcaatgtcaatactattgttattattcatccgttcattcgtttgttcattcattaacacatttaacaagcttgtactgaatgtctgctttgtgctggcaccatgttgggtgccttggacacagcagaaacaagacagaccaagtccaggtctcatgaggtctagtggaaaggttggatgaaaaaccaaaaaaaaagaaatatttaatatcaaatcagatggtgatgcctgcaacacaaatatatacaaaataatacagcagaaagtgaccccaatggatgtgttacttcagatacaaatggtggggtggatgcttttcaaagatgggggaagaaagcaagatgcatgggcactggggaagcagtgtatgcccagagaacacagttggtgcaaaagcccaaagctggagaaagcttccttggtgctaaatcagccagaattgggattcttgacaaacaataaaaatattgaccacctccaactgcaggctgtctgaaccctatgacccgttattatagttataactttatactataaacattaaatgtgattatgtaaaagtagaaataactaaaatgttacatgaaagtttgatatataaaatataaaaattatataatcatacgatactatatattatataaaatggaaactattttgtagtaggtataatatcataatgtgctataacatactgtcaacacaatatacagtgtatgatatgcacacataaaataaaatacataaatctatatttataatctagtatctaataatttttcaaatgtcatttaaactatcacatagtaaaataaaagagtacttctgagattcatccatgttgcagccagtgtcaataaatcacttcttttcatgttggggtagtattctattgtatagatgtttaattagtcacccactgtttaattagtcacccactgttacatttgggttgtttcctaattttggcaattatacagttgctgtgaaatttgagtacccgtgtttttatataaacaatttttcacttatctagggcaaatacctaggagagggattggtgggtcatatgataagtgtatgtttaacagtataagaagctgtcaaggctgggcatggtggctcacgcctgtaatcccagcattttgggaggctgaggcgggcagatcacctgagaccaggagttcgagaccagcctgaccaacatggagagacccttaactaaacctctactaaaaacatataaaattagccaggcgtggtggtgcatgcctgtaatcccagctacttgggcggctgatgcacgagaaacgcttgaacctgggaggtggaggttgtggggagccgagatcatgccattgcacttcagcctgagcaataagagcaaaacttcatctcaaaaaaaaaaaaaaaagctgccaaactttttgcccaaagtgaatgtaacattttacatttctaccaacaatgcatgaaagtttccattgctctgcattgttgccaactctcagcattatgtctttatttttaggcatgctaaaaggtgtgtacaggtatctcattgtggttttcattttcattttcttgaaaattaaagatgtcgagcatcttttcatcaccttattttccatttttatctcatataacaatatggatagatcgcaaatacatcacattaaatgaaacaagtccgactcaaaaagagagatacatacacatatataaacagacagagacacacacaggatgtctccatttatacaacatgtggaaaaggcaaaattatacagacagaaaatgggcttgtgatcatcaaggcctgggggtgggcaaagggatggactaaaaagtaataggaggaaatgtagggaagtgagggaactgttctctgtcttgactgtggtattgactgcatgatgtaattgtcaaaactttgagaattccacactaaaaagggtgaatattactgtatgtaaattatacctcaataaatacgaccttaaaatattacagtcatgttcacacaaaaacctgcacacaggtgtttatagcatctttattcataatcaacaaaacttggaagcaattaaggtgtccttcagtaggtgaatggataaataagtcatggtacttccagacaatagcatattattcaatgagaaaaaaaaaaaaaaaagagctagcaagctacgaaaagacatggaagaaacttaaatccacattactaagtgaaacaaatcaatctgaaaaggctgcatactttatggttcagaggcaaaattatggagacaaaagaaaatagccaggagtttagaggagtaggcgaaacacagaggattattgggacagtgaaacggctctttatccttctgtaataatgcatacatgtcattattcatttgtctcaacccacagaatgcacatcaagactgaaccctaattaaaccatggactttggccgatagtgtcaatgtagtttcatcaattgtaacaaatgtaccactctgaagggggatgttgatgatgggggaggctgtgtatatgtgagggtaggggatatatgggaaatctctgtaccttctgccccattttgctgtgaacctaaaatttctctaaaaactagtcttttatataaatgggcatacatatacatatatatgtcagcactaaaatatcacgttacaataaatataaaggagaaattattgaaagtcatgtacagtgaaatgtgttttcctccatatttcctggaattcatgaggagtgatacacttaggagtaaggtaaaatgggaataatgaaggggaccagaccttgttctagggtatgttaggaaggaagaggtgatctccaggcaccctcctgagagtcagctgacattgtcctaagttggggataatgttgtatcacaaaatatccaaaactgaaggaagaatagtgaagcttcagatacagtgctggatgaggtgaagggaggtaatgggtgagcagacattggtctaagatgttgagcagcatgtgatgggccatcagatactgtgaagaagtgaggaagcagagctaatgatggctcagtagacattgatctaaggtgaggtaatgggatgtgtcaccaagcactgcccaactagggcttgggaattaaaggggcattgtggccctgcttctttgactatgttctatcctttgggccccatcttcacctccccatactgcccttcttaaaggtgaaaccatctttgcagagcccaaatagttcccactcccagaactgccaatagactggccccagacgccacccagcaactgtgcatctaatcagatcatctgtcagcatctgtaaggccactgctgcctatctagggcaagatacctaatatccaatgaagatccacccaagtctgctctagttccctgctattggcttcaggcactcctctcggggcaggatgagcaggtgtgtggattgggttctggagtaaatgcggctctgtcgagttgcaactgagacaggacagcgctgtgcatgctgaggaaaaatgagcagggagtcttttgcaatcatgttggagctgtgggattctggaatcatggcaggaaatcctggaagcaagcatccacatgggatttcctgtacctgttttcccttctttagcatcagaccaaaaggttcacaatgactttttagctttagggttgagaagggatacagcccaggtacagactagaggtgaaaaagcctggtgtgttttagccaagttggttctccctattagcgcttcttatgctgcaacacagaaaaaaatcagacagaagtcacgcaacaagcatgggtcaactctccacaggtgcatttatggaatgcctgctgtatggcagtcatgggtctagactcatagtggtgaacaaaagggaaatattttctagtgtagaagccacagagaaatgaggaaaatacaccaggcagcatggtggaaattgctagggagaagaataaaggaggaagggtaaggggctggaattttaaaccaggcaggcagggaaggcctgtgtggaggtgtcatggaaaaaaagacatgacggacaagccacagataaaataaagaattgtgctctttgcaacgggcactgcaaatacaaaggccctgagtcaggaactgatgtttgaggcacatggcggggaaggtccttgtggggtgcgtgggacgaagatggacacaagtagacagtgaacatatggtggggttggttttcatatgagttatcaatttcatatgatttatgatttatctcatatctcatataatgtaagataatgatttcatgacttatcaacttatgaaagtcagatcattaaggaaagtaaaatgctgggcttcaactcagtcacaagtaaattaaaaaaaaaaaagaggcaggcaactgagtgagaagaattgtaatagcagaaggaagaatttaagttctcccagatgacctgaaaatcctaacctcaaaggctttcttgagggtggtgggagtgtacaaaacactgtgctgggccgggcgcagtggctcacgtccgtaatcccaggactttgggaggccgaggcgggcggatcatgaggtcaggagttcgagaccagcctggccagcatggtgaaacccccgtttctactaaacatacaaaaattagctgggcgtggtggcacacgcaatcccagctactcaggaggctgaggcaggagaattgcttgagcccgggagacggaggttgcagtgagccaagatagcgccactgcactctagcttgcccgacagagcaagactctgtctcaaaaaaagaaagaaagaaagaaagaaagaaagaaagaaagaaagaaagaaagaaagaaagaaagagaaagaaagaaaaagaaagaaagaaggaaagaaagaaagaaagaaagaaagaaagaaagaaagaaagaaagaaagaaagaaagaaagagaaagaaagaaagaaaaagaaaaaacactgtgctgggtgtcaaacacaatgtgctgagaacctgtggggctcagagagagtcctggcagataatgaaggggactgtaagtctttttctatgacaatggggactcaacatacgctctgaggtctgtgtctgaatacacagggagtttgtcttattgcagtatctcttgcttgatagaaatactcaatggggaattggatatgcacaactgtgttcgattcaaaagaagaaaatacccacaattctactagacagtgtgttctggaacaaacaactcacagaaggattcatcactatcatatatattatgttgtcttaccattcaaactgttggcactatacctaatccacagtaaacaggattatcattcccataatatgatctttcttatgaagaatttggtaacagtattctattgtagttttcatgagaaggcttttcctattcaccaaattgactcggttccttgtcagtatgaataatgacccaaggtttactggggatggtgacaatgtaggaagggtccctcgcctcattcagtgccttctcagaggccctctccagaacagccatgtgtgacattctgatgtggtcatttctatttacaataatatacatatttttctgctgcatgcgtgcaacagtgtacaatcagacccaaccctcaggggggttttctcacactgtttctctcaagcgtggctgctctgatgaacactgaacactgatttctgaacgaagcctttcccacagatgccacacttgtagggtttgtctccagtgtgtgttgtctgatgtttattcaaattggacctgttgctaaaggccttcccacactcagcacacacgtaaggcttctctccagtgtgaattcgctgatgcacttggagctgtgattttttagtgaaagacttcccacagtcactgcactcataaggtttctctccagtatgaattctgtgatgtgtaatcaactctgacttctgtcgaaaggtcttcccacattcagaacaaatgtagggcttttctccggtatgagttttctggtgcttactgagatttgacctgccactaaaggctttcccacactcggcacacacatagggtttctctcctgtgtgaactggctgatgcaccaggagctgagacttggaggtaaaggacttcccacagtcactgcattcataaggcttctctccagtatgaattctttgatgagtaataaagtttgacttgcggatgaaagctcttccacactcagtgcatacatagggtttctctcctgtatgaattttctgatgaacaatgagtattgatttctggttgaaggctttcccacattcgtggcattcatactgtctctctccagtgtgaattttctgatgtatattaagatttgacttctgagtaaaggcttttccacaagtattgcattcataaggcttctccccagtatggattctctgatgtgtaatcaagtctgacctctgggtgaaggcctttccacatttggaacatatataagatttctctcctgtatgagttttctgatgtgtaatgagatttgaccggttggtgaatgccttcccacatttattgcatacatagggcttttctcctgtgtgaattcgtttatgaacatggagttgtgacttggaagtaaacaatttcccacagtgaccacatttataaggtttctctccagtatgaattatttgatgtgtaatcaagtgtgccttccggatgaaggccagtccacatttcatgcatatatacgatttttctcctgtatgaattctctgatgcactgtgagtgctgacttctgagtgaaggctctcccacagtcactgcattcataaggtttctctccagtgtgaattctctgatgaataatcaactctgacctgtaggtaaaggccttcccacactcagtacatatggaagatttctctctactttgaatcttctcatgtgtaatgaggttggaattattgctgaagaccttcccatattcggtacatatatagggcttcactcttgtgtgaacacgttgatgtacctgaagttgtgacttggaaatgaaggatttgccacagttattgcattcatatggtttttctccactatgaattcttcggtgtgcaatcaattgtgttttctggatgaaggcctgcccgcattcaatacagatgtaggatctctcgcctgtatggattttctgatgaatcttgagtgtggacttttgtgtgaacgctttgccacagtcagtgcattcatggtgtctctctccagtatgaattttctcatgtatactgagatctgagttataagggaaacctttcccacattcactacattcatatagtttttctccggtatgaattctgtgatgcctgaaaagagacgatacttgaaaaaaggattttccacattcattgcacttatagggcttctctctcatatgggttttctgatgtgtgatgaattctggcttctgtacaaaagccctcccacattcaatacatacatagagtttttctcctgtaggaactttcagatgtaccttgaactgtgacttccaggtgaagctctttccaaattcagcacactcataggatttttccccagaataaattttttgatcttgagaggaagctggtttataaccgatgatttttctatgttgattatggtcccataatttctctcctgttggagtacattcacagtaagtatagaaagacattttaccatagttagtactcttcttaacattctttgaagcatcgtttctatcatgaatgtgtagatctaaattatgcttcaagccatttccaaataagtcacactgatagggtttttagggggatgtaaaatgtttgggttcacatgaattatccttctgatagccttatattcataatgcctatttgtagtcaatattttcttgattaaagcaacatcacttagatacttattttcttttctgataatattctatctggttatcagtctgtcactgttattctagaatgaaatacaatctcacatcatctctatcatcatcttccctttcattgtggaaagaagtcttttttttttccagagattccctgtaataaggtttgaaatccaaacactttttcaagggataataagtcactttttgcttatagagcagctagcagaggctagaggggaaggtaaaaatggcttatccagcttgaacacagagaaaagggtaagggtgagtaatttcatgagaagggtgtgacactacttaaatgaaacattctggggaacaattcagcagttaaaagaaataaactagatgaacagataacaccatggatagacatggaaaaaggcaaaaaacatgatatatagcataataagatttatataaactaatgatccatgcccctaattcactttaaattttacaacatgcacgaattaaaaaatgcttccattatacaaaacagtggcttctggtgggaaggcagatgggtgaggggaaagagagaaaaggggatattatcacaaaaataaaatgagaatcttcacccacattttcatggtcatagtgtgtcctaaactaaagacaatgattaaactcaaacctcatcaggtgaaatataaaaataaagcaatgacaaaaacaaacaagcccgggcatggtgcctcatacctgtagtcccagcactttgggaggctgaggcgggcggatcacctgaggtcgagagttggagaccagcctgaccaacatggagaaaccccaactctactaaaaatacaatgttagctgggcgtggtggctcatgcctgtaatcccagctacgtgggaggctgaggcaagagaatcgcttgaacccgggaggcggaggttgcagtgagccgagatcgtgccattgcactccagcctgggcaacaagagtgaaactccgtctcaaaaataaataaataaaaataaaaatacaaaaattagccaggcgtggtggcccacccctgtaatcccagctactcgggaggctgaggcaagagaatcatttgaacctgggaagtggaggttgcagtgagccaagattgcgccactatactccagcctgggcgacagagtgagactccctctcaaacaaacaaacaaacaaacaaagccaaccaggaagagagaccctaacagtgtggaatcgctcaagcaacatcagaaggaaatgtgagaaagggtgattaatccatgccatgtcaaacacagcagagaggtattcccaaagattaagtgacaatgattcccaagtcattagctggatgaaaggcctgaaggactgggaagataagagaaatctcatggccattactatagcaaaaatagttagagagcctgactggaaataaagttcttttttttttttttctttttcagactgagtcttgctctgtcacccaggctggagtgcaatggcatgatcttggctcactgcaaccttcacttcccgggttcaagtgactcttgtgcctcaccctcccaagtaactgggattacaggcatgcaccactacacccagctaatttttgtatttttagtagagatggggttttgccatgttgtccaggctggtttcaaactcctgacctcaagagatacacccaccttggcctcccaaagtgctgggattacaggcatgagcaactgtatctggcccagagataaagttctgaggcatctcacagtgagaaagacagaaataaaaggggtgtagcacgagtgggagtgtgtgacacagagtaaattttgaaagaaagcagatccaggaatacctggatgtaaacgagagactctaggacaatatggaaggcagggaaaaaaagactgttacagaaaaggaatataataaagatttatctttaatgaggctgactggcacatgacttataatcaacaaggaaggtcatccaggtagaaggcatttagtgatctgagaggcatcaagcaatataaaaaattcagagccttactgaagagtggtcttaatagcacttcacaggttccagtgtttttcaagacagctgagatttcctcctgtctcccatctaacctgagtcacattcacctcacttcactcacctgggcagctgtgacgtggcctctcaccctgcagtgcccatggttcctttccttgctccaacatgaccacctctggtttaggaacttgataccctgttcatgggaaatgataaaggtctgggtccagctaattacgtttcagagcccaacaaatacagtcttattgttcaatgatggtttgttctttaggaaagtaaccagatatctctgagtaatattctgagtaccctaaacaaacagagaaccctggaggaaaaaaggacaaaaccatcacctatctaagatgccaacagcattcgtcaactgagaatgaaaacactctcagtgaggcctcctttcagataccaaggtgactgtgcttacctactgagagcaggtggctgtaggtctccagcatcacatcccggtacaggtttctctgagaaaggtccaggtgccgccattcctctctgctgaaatcgatagccacatccctgaaggacactgatccctgtaagggcacattcctgttcaatgtgcatagtcagctttgcacggtggagtgactatatatgggattacggaacatgggttttgttgtttttaatttacttcattttttttttgagacagtcttgctctgttccccaggctggagtgcagtggcgcgatcttggcttactgcaacctccacctcccgggttcaagtgattctcctgcctcagcctcctgagtagctgggattacaggcacgtgccaccacacccagctaatttttgtatttttagtagagacggggtttcaccatgttggccaggatggtctcaatctcctgaccttgtgaccttgtgatccgcccacctcgacctcccaaagtgctgggattacaagcttgagccaccgcatctggccgtttttgtttttgtttttgttttttttccttgagatggaatttcactcttttggcccaggctggagtgcaatggcgtgatcttggctcactgcaacctccacctcccaggttcaagcaattctcctgcatcagcctcctgagtagctgggattacaggtatgtgccaccatacccggctaaattttgtatttttagtagagactgggtttcaccatgttggccagaatggtctctatctcctgacctcgtgatcttcccgcctcggcttcccaaagtgctgggattacaggagtgagccaccgcgcctggccaatttacttcctttttaaagaacctgccactcatttccctaatagcttattacgaaaaattttaaacatacagaaaattagaaagaattgtacagtaaaaacctatatatctactacttagatctaccattaacaccttaccctacttgcttcatcacacattgatccatcttacttttttttatgtatttcaatgtaaattgcagtcatcactacactttctcttaagcaccacaaaatgcaaattattaactagggtgtaacatttgttaacctgataaggtaaaatttagtacaatacaaataaatgcaacaatctttattttgccatttgaccttgtgacaaatgtatacacctgagtgataagaaatttctaagaaataatattttacataggtcacatattaaatatccagttttagctggggtgcagtggctcacgcctgtaatccaagcaagaatgtcagagggggccggacacggtggctcatgcttgtaatccaagcactttgggaggccaaggtaggtagatcacctgaggtttggagttcgagaccagcctggccaacatggtgaaatgccgtctctattaaaaatacaaaaaattagccaggctggtggcacgtgcctgtagtcccagctatttgggaggctgaggagggagaatcacttgaacttgggaggtggagtttgcagtgagctgagattatgccacggcactccagcctgagcgacagagggagactctgtctaaaaaaaaaaaaaaaatctagttttacataatttgtggaacacagaaatctaacaaagaattccagctatttgttctgttctacagtcagtcaatcactcatttttcaaaactggccattgaaataggctgtcttggctgggcccggtggctcatgcctgtaatcccatcactttgggacgccgaggtaggtggatcacgaggtcagacgttcaagaccagtgtggccaacatagtgaaaccctgtctctactaaaaatacaaaaaattagccgggcatggcgagcacctgtaatcccagctactcaggaggcttaggcaggagaatcgcttgaacctgggaggcggaggttgcagtcagccgagatcatgccactgcattccagcccgggatacagagcaagactccatctcaaaaaaagaaagaaagaaagaaataggctgccttttagtcttctagcacatggatgaacaacctgccacacagtggctgatcaatttaggaccagtcattatgctactcctgaggacacagaaatgaattatttatgttactagtcttcacgcaacctgaaatacatagaaaataaataagaccaaagtttgaaaaagtgaagacattaagttcattaaggtgctgaaaagtagatctctatctgagacaccctgagggctaaaaagaagaaaaagtgcattctacatgaggaaataagtttacatttcatagagcggaagaatttaacttggaagataagaagagtaatacaaagtatggggtaagggggacattgcccagcaaagacaagaacaaaaagatggggagatgggctccagtgagccacgattgcatcaccgcactccaacctgagtgacagagcgagaacctgtctcaaaaaaaaaaaaaataaaataaggccgggcgcagtggctcatgcctgtaatcccagcactttgggaggccggggcaggtggatcacctaaggtcaggagttcgagaccagcctggccaacatggtgaaaccccatctctactaaaaatacaaaaaattagccaggtgtggtagtgtgtgtctgtaatcccagctacccaaggcagaggtaggagaatcgcttgaacctgggaggtggaggttgcagtgacccaagattacgccactgcactccagcctgggtgacagagtgagactccatctcaaaaataaataaacaaataaataaatattaaaatacacaatgagggccgggcacagtggctcacgcctattatctcaacaactggggaggccgaggtgggtggatcacgaggtcaggagtttgagaccagcctggccaacatgttgaaaccccctctctactaaagatacaaaaaattagctgggcacagtggcacatgcctggaatcccggctacttgggagactgaggcaagcgaatcgcttgaagccaggaggcagaggttgcagtgagccgagattgcgccactgcattccagcctgggcgacagtgcaagactccatcttaaaaacaaaacaaaacaaaaaaaaacaccacatgagtttaaagaacagcaaatagggctggacatggtggctcacacctgtaatcccagcactttgggaggccgaggcgggcagatcatgagatcagaagattgagaccatcctggctaacatggtgaaacaccatctctactaaaaatacaaaaaattagctgggcgcagtggcgggcgcctgtagtcccagctagtcaggaggctgaggcaggagaatggcgtgaacccgggaggcagagcttgcagtgggccgagattgcaccactgcactctagcctgggtgacagagcaggcctctgtctcaaaaaaaaaaaaaaaaagagaactaaggccagggcaggggctcacgcctatagtcacagtattttgggaggccgaagtgggtggattgcttgagcctaggagtttgagaccagcccaggcaacacagtgagaccctgtccctaaaaaaataccaaaaaaattagccatgcctggtggcaggcacctgtagtcccagttactcgggaggctgaggtcggaggatcgactgagcccgggaggtcgaagctccagtgagccgttaatgcaccactgcacaccagtctgggtgacagagggagaccctgtctcaaaaaaataaataaaacttaaaaagtaagagacttacgaatcatactaaccaaatgcaccttgtggactttggcccctaattaaaatgaaccaatcttaaaaagatatttacaacaatttagagaaatgcaagcaatgggtattagatgataacaaagaattactgttattttgttgtaggtgtgatattgacttatttgttatgctaaacaaaagaaaaaagaattcatctctttgagatacatatcaaagtatttttagataaaacattgtgtttgagattcactttaaaataatccaggagctgtgtaggaaggtggtttcagatgaaataagaatggcagaatgttgatgatgactgaaactgggtaaaaggtacaataggtgaacaggttgcttatactattctctttacttttgtatatatttaaattttttcgtaataacatgtttttgaaaaatatgatcctccaaataaaaaatctaatttggaattgcacagttaaaggaatgcctatttccacatggtgtacatatttaaagaaaagtattggctgggtgcagtggctcacacctgtaatcccagcactttgggaggccgaggcacatggaccacctgaggtgaggggttcaaaaccagcctggccaacatggcaaaaccccatctctgctaaaaatacaaaattagctgggcatggtggcgcatgcctgtaatcccagctacttgggaggctgagggaggagaattgtttgaacctgggaggtggaggttgcagtgagccaaaatcacgccattgcactccagcctgggcaacaagagcaagactccatctcaaaaacaaacaaacaaacaaagtatactagggacttgaatacccttccctcacctcagcaatttatcaaaatactagacaggaaatcatcaaatatacagaaaaagaagcaacagtatttaattgatatttatagactactgcaacaaacaacagcagaatacacattcttttcaagaatcatagaaaaatgaccaagatagaccataccctaggctataaaaccaacctcaacaaatttaaatgaataaaatacaaagtatgttccacaaggaaatcaaacaaaaaatcaataacagaaagaccacagaaaagtctccaaaggaattaaaaaataaaaacaaaagctttctggaaaagcaaaaactatttggaaattaataacccacagttaaatgacctataggtcaaagaagaaatctcaaaggtcattttaaaaataaatacacctggccgggcatgatggctcagcctgtaatcccagcactttggggggccgaggcgggtggatcacatgaggtcaggagttcgagaccagtctggccaacatagtgaaaccccatctctactaaaaatacacaaaattagcagggcgtggtggcacgcacctgtagtcccaactacttgggaggctgaggcaggagaatcactggaacccgggaggaggaggttgcagtgagccgagatcatgccactgcactccagcctaggcaacagagcgagactctgactcaaaaaaaaaaaaaaaaaaaaaaaaaaaaattcaggaaaacaaaacaaaaaacagaaaaaaaaagtcaataaaacacaatccagttgttggggagaaaaaatcaacaaaatgcggctgattggcctgttagtcaactagactgatgaaaataaaaagacacaaatcagcaatatcaggaataaaacaggaaatatcatgacagattcaggaaccattaaaagaaaaatatgggaatacaaacacttatttagataaactaaataaattagcttatttagataagataaataatcttataactattaaattacattcataatttaaaagttggtgaaaagaaatttctaggcctagttttgccagagaattctaccaaacttacaaagaagaattagtcttggccgggtgtggtggctcatgcctgtaatcccagcactttgggaagctgaggcgggcagatcacctgaggtcaggagttcaagaccagccttaccaatatggagaaaccccgtctctactaaaaatacaaaattacctgggcgtggtggtgcatgcctgtaatctcagctactcgggaggctgaggcaggagaatcgcttgaacccaggaggcagaggttgcggtgagccaagattgtgccactgcactccagcctgggcaacaagagcaaaactctgtccccctcaaaaaaaagaagaagaagaagaattaatgtgatttttacacaaactcttccagaaaatcaaagaggaagacctcttccaaattaactttgtacagccagtattactctgacatcaaaaccaaagaaagcacaaaaaaagaaaactatagaccagtatctttcataattttaggtacaaacatcctcaacaaaatatcagcaaacaatccagcaatgaataaaaagaatcgtgtactacaataactgaaattcatgggggaaccctctgtatcattttgtaattctctgtggatctataattatttcaaaataaaaagttttaaaaaatatactcctaaagaaagattattccaaaacatttggaatattttggaatagttatgactggaaaatcattgacaagactcactgtacaagtcacatgagagaatgtgaattacagttcacctttgaaccacatgggtttgaactatgtgggtccatttgtaacacagatttcttttttcagtaaaattacaccgagtgtgcctccctctcctgccctcccttttaccttcacctcttccccctttgccacccaaaacagcaaggccaaactctcctcttcctcagcctccttaacctgaagaccataagggcaaagaccttcatgatgattcacttccacttaataaataataaatatattttctcttccttttgattttcttaaaagcattttcttttctctagctgaattttattataaaaatacagaatataatacatataccatacaaaatacatgttaaccaactctttgctatcggtaagttaacagcaggctatcagtagttaagtttcagggatggtcaaaagttatacacagcttttcaactgcacagaggttagcgccccaagcctgcatcgtttgaaggacaactgtgcttagtataattgcggtttctgccattttttctttttattatactttaagttctagggtacatgtgcacaacgtgcaggtttgatacataagtacatatgtgccatgttggtgtgctgcacccatcaactcatcatttacattaggtatttctcctaatgctatccctctcccagccccccaccccacaacaggccccggtgtgtgatgctccccaccctgtgtccaagtgatctcatagttcaattcccacctacgagtgagaacatacagtgtttggttttctgtccttgtgatagtttgctcagaatgatggtttccagcttcatccatgtccctacaaaggacatgaaatcatccttttttatggctgcatagtattccatggtgtatatgtgccacattttctcaatccagtgtatcactgatggacatttgggttggttccacgtctttgctattgtgaatagtgccgcaataaacatacatgtgcatgtgtctttatagtagcatgatttataatcttttgggtatatacccagtaacgggattgctgggtcaaatggtaattctagttctagatccttgaggaatcgccacactgtcttccacaatggttgaactaatttacactcccaccaacagagtaaaagcgttcctatttctccacatcctctccagcatctgttgtttcctgactttttaacgattgccattctaactggcgtgagatggtatctcattgtggttttgatttgcatttctctgatgaccagtgatgatgagcatttttttcatgtgtctgttggctgcacagatgtcttcttttgagaagtatctgtttgccattatttttaatggcaaaaccgcaattacttttgcaccaacctaatacataaagtaaggctataatgttaacagggatgtagaaggaaaatggcactaattattagggaggcagacctgatgttgaatatgaaggtgagaaaaaggattaagaaataattcttagtcatcaattttgtgtcactatgtacattctggtgccaggaatgtgtagagaaggctgaggaaataaaaaaaaatgacttaaattttgtatatgttgagatttagctgacaggatatatacgagggtgtacactaggtggtggatagagagcttatgattaattgtgatagagattagctgaatagagagcttatttatttattttattattattattttttgagatggacttttgctcttgttgcctgggttggagtgtaatggcgtgatcttggcttactgcaacctccgcctcccgtgttcaagcgattctcctgcctcagcctccccagtagctgggattacaggcatgtgccaccatgcccggctaatttttgtatttttagtagagactgggtttcttcatgttggtcaggctggtctcaaactccctacctcaggtggtccaccagcctcagcttctcaaagtgctgggattacaggcatgagccaccaggccaggccattccagtgttttacaagcactttgggaggccaaggcgcagatcacctgaggtcaggagttcaatatcagcctgaccaatgtggagaaaccccaactctactaaaaatacaaaaattagctgggtgtggtggcacgtgcctgtaatcccagctacttgggaggctgagacaggagaatctcttcaacccaggaggcagaggttgcagtgagccgagattgcgccattgcacttcagcccgggcaacaagagtgaaactctgtctcagaaaaagaaaaaaaaaaaaaaaaagaaagctatattattaatatagtcacaatattatttattgtataaagattcagaggtcctttgtatagaggtcactggattcaggggagggtatgagcatgcagatggaagtggaaagaaaagtactaaagatatttataatttttaatatgtaaaattatgatttttgaaagctaccttgttgatttcttcatttaactgcattcagagattacagtttgtctcttgtgatgcatattgattgtgcttatagggctcagaacatcatttctttgaaaatggtacctatatacctgaaaagaatatacatgttctaatttttctctttatcatacacttgtatagtcacaccctacacacaccaaactccccaacccccaaaccctatgttatcaagaatttagtaggaacacgagatgtcatgttaggctggaatagagctttaccacctcaccaaatgagcttcttatacacagtttgtccaggctgggtgcagtggcccatgctgtaatcctgggattttgggaggctgaggcaggcagattgcttgagcccaggagttcaagacaagcctgggtaacatggtgaaactgtctctacaaaaaatacaaaatttcgccagttctattggcgcgtacctgtagtcccagctactcggcaggctaaggtggggggatcgattgaacctgggaagtccaggctacagtgagccgtgattgcaccacagcactccagcctgaggatagagtgagaccccgtttcaaaaaacaattaaaataacagtttgtccaggaagaaacctcctcactcaaagataatactaagcatcgcctaatgtacaaagatactatgagcaaaaaggataaaacaaaaatagagaggagattaaaaggaatacactacaaataatatactacaaataaattgacacacaacagaaaaaacatccaccatgaattcaaggaattcactataattataactacttaaaataattaaacaggccaggcgctgtggctcatgcctgtaatcccagcactttgggaggccgaggtgggtggatcatgaggtcaggagctcgagaccagcctcaccaacatggacaaaccccgtctctactaaaaatacaaaattagctgggcatggtggcacatgcctgtaatcccagctactagggagtctgaggcaggagaatcgcttgaacctgggaggtggaggttgtggtgacccgagatggcgccactgcactccagtctgggcaacaagagcgaaactccgtctcaaaaataaataataaaataaaataaaataaaataaaataaaataaaataaaataattaaacccaaggaagaaatagtggaaaaacagataggctaagaatgtggttatgtaaatttttgaaaaataaattggcagaactcagtaaagtttttttgtttttcaagcaacacagaaataaaggtctccttgaaagcaatgaaaagaccctgctaaaacacaaaaggtaggccaggcacggtggctcacgcctctaatcccagcactttgggaggctgaggtgggtagatcatgaggtcaggagctcgagaccagcctggccaatatggtgaaatcctgtctctactaaaaatacaaaaattagccaggcatggtggcgcgcgcctgtaatcccagctcctcaagaggctgaggcagaagaatcgcttgaacccggcagatggaggttgcagtgagccgagatcgtgccactacactccagcctgggtgacagagcaagattctgtctcaaaaaaaaaaaaaaaaaaaagcacaaaaggtggcaaagacaagtgagcaacataaaatggaaataaggagtttcaaaaagaaaatagaaaaaaagaatttaataaaaacatctaattaaaaaatccttgaagtggcagtatagaacttttattgttattcacagtataaatttaatagtcttaaacgatagatataaagattgggttaaagaaggtaatgttataaagccgccactaaaagaacaaaagaaaaaacagaggccaggcacggtggctcacacctgtaatcccagcactttgggaagctgaggcaggcggatcacctgaggtcaggagtttgagaccatcctgcccaacgtggtgaaaccccatctctactaaaaatacaaaaattagccgggcatggtgacacacacctgtaatcccagctactccagaggctgacgcaggagaatcgcttgaacccggaagccagagactaccataaggcaagatcatgccattgcactccagcctggcaacagagcaagactccgtctcaaaaaaaaaaaaaaaaaattatctttccactgccatacagaagaaatgtacaaggactccaaaggatgacagtaaaaggaggagcaaaggcctatctggaattgccaaaggaaaggaagcaagaacctccaccttaatatttgagctgaattctcaccaaaaaaattaaatatgacaaggacacaatctgaaatgaatctcagatgccattactgtcactgcaccaaattacatagcatcaaaatttataaactataggaaactataggaaaataatagcaagaaatacattggtggtgggaaactttacataatatctcccagctccatttgataaagtagaaaaaaatcattaatactatgaaagcctcataactatataagatatcttataagttaccaataaaatcttattgctaagatatcaaattctatatcctggaaacagatttcctgtttacacagtgccggtgtaacattcagaaatgttaaacataaaattttcaaaacaaaaaacacaaaaacctttaatgttatgccacatgcaaataattctctccatctctgcaatcctaattttattaaaagtagaatattttaaatgaaagtcttaacatgtagaaatgaaaatgtggtaagtggtcaatgaagacttggtgcttggtgggaaacaatatgttactagaatttcattctttttttctagatttttaaatgtaattgcataaggtaaattacttctctaaattatttttggtactgttttgctagactgtgtaccattacttctgatatacagtatttttttgaggtattttactattttagtttttagacttctttgactttggactgggctgctgaatgagaaaacagtgcttgcttcacttttttcccagtgataaactattagtctactgttttcatctactcttttttttcttttttgagacagagtttcgctcttgttgccccggctggagtgaaatggtgtgaactcaccgcaacctccacctcctgggttcaagtgattctcctgcctcagcctaccagtagctgggattacaggcgcccgcctaatttttgtatttttaatagagacagggtttcatcacgttagccaggctggtctcaaactcccgacctcaggtgatccaccctccttggcctaccaaagtgctaggattataggcgtgagccacggcacccggcctcatctactcttgaatacagttagtgaatacatttgacttctgaatctatttatttccagttcttttgggcattgaagttaactctgtaaacaaaataaaacaaaaacctgaaacaaggttgagaataatttctgatattatctgttactcaaaactttggcatgaaaatcaactgtaaaatcacatgatcttttccatcatttttgactgcgttgggggtgttgaatcaacattttaattcctttaagggcttctgtataatttgttcttaccgagttgaaaatttatttcttataaaatttcatccttttgtttaggttttcatatatttgcatggtttttttttttttttttttgagatggagtttcgcgcttgttttccaggctggagtacaatgacgcaatctcagctcactgcaacctccgccacctgagttcaggcgattctcctgcctcagcctcctgagtagctgggattacaggtatgtgccaccatgcccagttaatttttgcatttttagtagagacagggttttaccacgttggtcaggctggtctcgaactcctgacttcaggtgatccactggccctggtctcccaaagtgctgggattacaggcatgagccaccacgcccagccctatttgcatgattttacataatactcactcgtgattgtttgaatcttaggtatagaagtaactattactcctgttttctaacatattttgattatgtttatcttcactcttttttcttgatcattaatatggagaagcaacttgtgtttctgtcacatttttatcaaccattttttgttctctgtgactcatgtctttgcttttctttttttagtcctcgttcttttttgtattttttgactcattctttttgtaacttcttcagttgaaaccataactgcttttttcccaaaatttctaagattccttaaaaggcacttaatctatagttttcccctctatctacagtttagctttaccacacgaactttaaaatgtagtactttattagcagggcacagtggcaggtgcctgtaattccagctaggagggaggctgaggcaggagaatcacttgaacccaggaggcagaggttgcagtgaactgagatcgtgccaccgcactccagcctgggcaacatagtaagatcttgtcacaaaaaaaaaaaaaaaaaaaagtagtactttattgaactattttgcgttgtggtaaaatatacataaaatttgccattataattatttttaagtgtccagttcagtggcattaagtacattcacattttgtgcaagagcctttctgttttgttttgttttggtttttgagatggagtttcactcttgttgtccaggctagaacgcaatggtgtaatctcggctcaccgaaacctccacctcccgggttcaagcaattctcctgcctcagcctccagagtagctgggattacaggcatgggccaccacgcccagctaattttgtatttttggtggagacagggtttcactatgttggtcaggccagtctcaaactcccgacctcaggtgatctgcccgcctcggcctcccaaagtgctgggattacaggcatgagccaccgcacccagccttcaagagccttttacttatttgtaatttaatgctctttgtcagaaaacaatcaatattatagcaaagatttatattttttatctgctttgatcaataagcttctgaaagtagtgtgataaaatggccaatattgcatttaatgatttctgttcatttttacttaaaatagttcaaagatacattattaattaaaaaaatgctaataatttgtataattctttgtacatgattcttttcataaggatgaacaacatgttttcatccctttaggtgattttcatcttaaatcccttttgatctgttcctaaattgcagccctagctttcttttggctcactctcttatttttaaatgaggacaaaagcagtcctaacctctgagagttagcctcgtactatcaattaagcctcagtgttgctagaagctaacctggcaagggccagctaattcatggtgttctccatggtgctacacaaaaacaatctcttagaacaccaacagcaaacaagaccaatctctgaccatcatggtgtaagatgataccaagaccactctgtcgttatatttgagcatagacaaaaatcagaacattcttcaaaccacaaaagtgaataaaagtctccttattctgcctaatgcaagagactgctgcttttttcttttgagacaaagtctatctctttcatccaggctggagtgcagtggcatgctcatagctaggtgtaatctcgaactcttaggctcaagtgatcctcctgcctcagcctcccgagcaggtgggtctataggcacacagcaccatgccagactaattgtttttcttttttttttttttgagacagaggctcactctgtcacccagactggagtgcagtggtgcaatctcagctccctgcaacctctgcctcctaggttcaagcgattctcctgcctcagcctcctgagtagctgggattacaggcgtacgccaccatgcctgacaaatattttttatttttagtagagacggggcgtcaccatgttggctaggctggtctcgaactcctgacctcaggcaatctgcctgcctcagcctcccaaagtgctgggattataagtgtgagctaccgcaccaggcccaaactaatttttaatttaattaaattttttttttggtagtgacagggaatcactacattgccagggctggtcttgaacttctggcctcaagccatcctcccaccctggctttccagtgttgggattacaggtgtgaacgaccgtgcccagccaactgctgctgctttaccaactgtaactttagcctcaagctatccttcctatcttctagaataaaattattaagatactcaatcctaaaactgcccaagagcaactaaagtagaggttcactgaggtgcagatgagactctcaccacgtgactagaaccctgaaatgaaattccactacttctaatatatccaatagaaagagaaggcatgacaatatccactgcgatattgttcataatagtttctgtattttaccaaacaaacattaaaacagcaatgtacaaaaaagttaatctgctatgccattctgaaatcaagagaaaaaaattgtagttgttttcatttgtatacagaactaagcaatcaaagaaaatgaataaagcaggttatcactaccgggagacacaggtagatggaaggcagaggtgggtgaaccacagtcccatctctttcaccataatacttttcaatatattgcttttcatatatttctaacttttgaactaggtatatgcattgcctattcaaaagattaaactattcctaataaattatcacaatatcttcagatggataagaaataacaatacacccaggccgggcatggtgtctcacacctgtaatcccagcactttgggaggccgaagcaggtggatcacctgagggtcaggagttcgagaccagcgtggcccagatggtgaaacaccatctctactaaaaatacaaaaattagccaggcgtggtggctcgcacctgtaatctcagctactcaggaggctggggcaggagaattgcttgaacctggatggcagaggttgcagtgagcggagatcatgccattgcactccagcctaggcaacaagagcaaaactccatcaataaataaataaataaataaataatttaaaaaataacattacatccatgaaataagaacgggatggcaataaaaaaaaatttaggaaacaggctgggaacagtggctcatgcctgtaatcccagcactttgggaggctgaggtgggcagatcacctgagatcaggagttcgagatcagcctgatcaacacggagaaaccccgtctctactaaaaatacaaaattagccgaacgaggtggcacatgcctgtagtcccagctatttgagaggctgaggcaggagaatctcttgaacccaggaggcggaggttgcagtgagccgagatcatgccattgtactccagcctgggcaatgagagcaaaactctgtttcaaaaaaaaaaaaaaaaattttaggaaacaaactagagtttttaaaaattaaaacattaagttaaaatgtggatagtggtaatgagaagctcaatagaagggctggaaggcaaaaggtgtcaaagttacccagaatggatagcaggaaatacatagaaaatagtagagaaaagaaatggagaagcaacatctgaaaaacaagtttcagaaagaaaacagagaaaacatttgtgtttgaggaggtggtttaggaagaaatgaaaaaatgctttcaaaatctcaaacaaaagtcacttctaacaaggaattctatttgcagccaaaacatcaatatagcgtgatgacaaaatcaacaacagttttccttgacagtgcacctctccactgtcacacaggtggcctccagagacggagacattacccacgtgttcattcttgacaggaagatcaagttttctttcaggagcaccaagtctagagtccagctggttcctaaggcctgtctgcctctgccctaaggctgtggtgacagattagagctatctactcttggactgaaattccaccccttgggactcctcctcctcacctcataggagctgccatgatcctctggagccagggctgaggatttctggggtgaggtccaactagctggcatggccacactggatctcaaccctttttgtctagggtgcctgaagtttagtggtcatctgtgaactcagcagagctgctccgaagaggtgggctggagtctggaggaaggtctggcccagggactccccagagacacccaagaacctagaaaaacaatgtccacgtagtcattcaacattcactacataaacacttcctggatacaccaaggtgcaggtccctgcgctagaaaccagagcagtggttcccaaacgtaggtatgcattcaagtcacctggagggcttgttaaaacatagtttaaaattctcaacttcaccccttcgatgggtctaaggtaggccctaagaattttattttctaataagtgcccaggaaatgctgatgctgctggtacaagaaccacactttcagaactgtggagaacagtgctgaaatatgggaaaagccatgaaatttagagtaacattactgcagatttgaactgcagctgtaccacttttcaacaatgagaatataaagaagttactcagattttgtttcagaaataaggatgaaaatgcctgtgtcacagttactaagattaaatgagattatgcttttaaagtactcaatgcctccctgccatgcaagaatcacgcaataaatatcagcaattaccatgcactatattaaaacgtaatacagaaaaccatgtcatcaaaacaagtaagataataaacatatcagacaatgttgatctatatatgaaataaaaatgatatgcgattgagtgtgcacacggcattcattgtatacatatccccaattggtgcatgcaattggccatgcatctggaataaaacaaactagatctccacctcacacaatatttttttcttttaagatggggtctcgctctgtggccaggctggagtgcagtgacacaacctcatctcactgcaacctccacctccagagttcaagtgattctactgcctcagcctcccaagtagctgggactacaggcatgcgacaccacgcccagctaatttttgtatttttagtagagtcagggtttcaccatgttggctgggatgatcttgatctcctgaccttgtgatccgcctgcctcggcctcccaaagtgctgggattacaggcgtgagccaccgcgcccaacccacctcacactattaagtagacaaattccaggagcactaaacatttaaatacatgcattttttaaaacccctaaggatattaaaataattttcagactatatatttgtatagcattgtggtggggtgataaggatcttattacacatgacaggaaacccagaagctataacagaaaaaaacaggtatttctgattatgtttcctaattatatgtttaaataaaccataaaattcgacataaagatatataagaaattttttcaatatgtgatgatagcttgcttgtaatgttaactctaagcaatcactaagcaaaaaaggccaaaaaaaaaaataaaagaaactggaaaaggtatgaaaattcagagaaaaggaagcaaatggcaattaacaaaaagataccaacttaactaaaagaaaaacgcgtcagaacaattagagagaaattttccttagaatcataaaagctttaaaaaagtaacagaccaagcacaatggatcacttgaggccaggagttcgagaccagcctggccaacatggcgaaacgctgtctctactaaaaatacaaaaattagccaggcgtggtggcgggcacttgaaatcccagctactcaagaggctaagacaggagaatagcttgaaccagggaagcagaggttgcaatgagcggagatcacggcattgcactccagcctgggcgacagagcaagactctgtctcaaaaaaaaaagtgacaacatccactgttggaaagcatttaggcaaattgcttttataaattattggttgaagcttgaattgctataatgtcttttgagctatttagtcatatctatttttttatttttttgagatggagtttcactcttgtcgccccggctggagtgcaatggcatgatcttggctcactgcgacctccgcctcccaggttcaagtgattcttctgcctcagcctcccgagtagttgggattacaggcacccaccaccacacccagctaatttttgtatttttggttagaggtgtttttccatgttggccaggctggtctcgaactcctgacctcaggtgatctgcccaccttggccacccaaagtgctgggattacaggcgtgagccaccaggcccggtcagtcatatctagcaatacactcaactgatcccaataatatagttttaaatatataaagcagaaacagaagaaaggacaggtggacaaataacttttccaatgtgagtagtttaccttcctcaacaaaataatctgtgaggagatacataatatatataacatatgattaatatccataacaatacaaattagagaacatattacactcttttcatgtaatagatgtgacatttatgaaaaatgaggaagaactaggccataaagcaattgttcaactgaagcatcacctacagacactaattgaaacataaagtgcacttcttttttttttttttttttttggtgctctgtggcccaggctggagtgcagtggcaagatctgggctcaccgcaagctccgcctcccgggttcacgccattctcctgcctcagcctccagagtagctgggactacaggcgcccgccaccacgcccggctaattttttgtatttttagtagagacggggtttcaccgtgttagcaaggatggtctcgatctcctgacctcatgatccgcccgcctgggtctcccaaagtgctgggattacaggtttgagccaccgcgcccggccataaagtgcacttctaaacagctcatgggtcaaagaaaaacaattactgaaaaaaatttttaaacacttagatttgaacaatacgaaactgctacacatcaaaacttgttaatctttatattacaggctgaaatggaaagaactgaactttcaactcaggtcagaaagcaagctgatcacagtcctcaccgaccaccatagctgaccctacaggccctcagtcactgaccacagactcccgtcactgacccccaaaccccaatcactcatcccaaagagccccatcaatgacccgagaaatccctgtcacagacaaccatcaacggacgtcacagacccccatcaccatgccccgaaaccaccatcactaattccacagacaactcctctattactgacttcacagaatccctaattgcaaccaaccaaaatcgtcacagagacctctcggcattaaaacgtgaaaatagtcctgacgccagcggcgaaatagccttcggggaccacttccacttccggtccgacttctagcacctccccttatggactgttgatattgcgcatgctctaaattaacttggaagccaatttcagcccacagtcaacagggagcacacacatatttagagacatcgtgcagtttccgtaatcggcgctcacgggcagagaatataaccgcgcccttatggtgtttatttgtgtgggtcgccatctttgatgcgtatcgattccgtacagtggaggagtccgcctcctggagtgttgactagagtaaggcaaggattttcacatagaatgcaagactgtaaccagtgtgaccacgcttgtacccaagaagaagttcctgaagataggatctggagctttatgtttttttttgtttgtttgtttgttttgagacagagtcttgttctgtcgcccaggctggagtgcagtggcgccatctcggctcactgcaacctctgcctcccaggttcaagcgattctcctgcctctgcctcccgagtagctgggattacaggcaagcgccaccacacccagctaatttttttgtatttttagtagagacgcagtttcacgtctctactggtcacgctggtctcgaactcctgacctcaaatgatccacccaccacggcctcccaaaatgctggggttataggcgtgagccaccgcctccggctgttatatttacaatacctaagttaccccttggttacggcacactgcagaaaacaacgatttactaggagaaaccatgggggaactaggaagccagggatcctgagagaaataagggagataagaggaggcatcaggatggtacaatctattttttggagacaccactcaggagaagggtggactgggatctgagttcactcctgggtgaaaccactaggcaagacggagttatgtcacagtaggtagtatcctgcaggaagggaggtacaatttttagtagttgaaaacacattaggaaatagggtagaagttgggttagtacaatcctcttctaggagataccatggaagaggggttagaagtctaagcatcccctttgaaacggctggtagaaggctttgggaggtatagatattttaatccccttaatctccatcagcatccaccctagctaactcaagcacaactatagtaagcagcaacaataaaaataataatagtcttggctggtcgtggtggttcatgcctgtaatcccagcactttgggaggccgaggcgggcacatcaccttaggtggggagttcgagaccagcctgaccaacatggtgaaaccccgtctctactaaaaatacaaaattagctgggcatggtggtgtgtgcctataatcccagctacttggggggctgaggcaggagaatcgcttgaacccagaaggcggaggttgcagtgagccgagatcatgccattgcactctagcctgggcaacaagagcaaaactccatctcaaaacaacaacaacaacaacaacagcacaataataataataacagtctttaatatggccaacgtgtgactaaaaacacctgaagaaaatcttgctttttttttttttttttttttgagacagagtctcactctgtcacccaggctggagtgtaatggcacaatcatggctcactgcaaccttgactgcccaggctcaaaagcaatcccagctgggcgcagtggctcatgcctgtaatcccaacgcattgggaggccgaggcaggtggatcatgaggtcaagagatcgagaccatcctagccaacatggtgaaaccctgcctctactaaaaatacaaaaattagctgggtgtggtggcgtgcgcctgtagtaccagctacttgggaggctgaggcagtagaatcacttgaacccaggaggtggaggttgcagggagctgagatggagccactgcactccagcctggtgacagagtgagactccaaagaactgggattacaggcgtgagcctccgagcccggccagggagttttgtttttttttttttttgattgcaaagagatgttgaattttgtcaaatgctttttctgtttctattgagatgaccatatgatttttgtccttcattctgtcaatgtgatgtattgcacatactaatctgcatatgttaaaccatctttgcttccctgggataagtcccacttgatcattgtgtatctttttgacatgctattggatttggtttgctagtattttgttgaggatttttgcatctgcgtttatcagggatcttggcctgtagttttctctttcttctgtctttgcctggttttagtatgaggatggtgctggcctcacagaatcagtttggaaaaattccttccccttcaatttttttggattagtttgagaaatattagaatttgttctcccttaaaagtttggtagaatcaaatccaagaaggggatgatgagaacctctaattttcaggcaaactgggcagttgttggtaatcaggtgacctagtagttgtcattggcatctgaagaggtgggcagtcttgtgggactgagcaattaaactgtaaggtctgtgctaactcaggttagtgtcagaattgaattcaattgtaggacacccatgtagggagggctggagaagtggtgtcagaaaaactccacatattttgtgttaaaaacgaaacattctggaagtattgagtgttgtgagagtatatatttttaaaaccagtttgtttttcctatgcaactgtataaaaagacatatcaagtctcactccccccaccaccccaatcactataggttatcactataggtattgtttctggttcacgtttccaatacttcttttttcctatcttttctttttttagtgaatataaacaaatgcttatatctaatctaatttccttttcttttttagacgaactatatgttacactgttctatactttccattttttatatattccagagttaatgtcattccgtagagagcttcgtttttttttttttctgctgtgtgtgtatgggctgcataaaactttatgatgtgactgtggtgatttgagctgctacctttatcaaatactaagcatctatgtggatgttaatttcttttttttttgagatgaagtctcactctgtcaccaggctgtagcgcagtggcacaatctcagctcactgcaacctctgcctcccaggttcaagcgattctcctgcctcagcctcccgagtagctgggactacaggcgcgtgccaccacacccagctaatttttgtatttttagtagagacggggtttcatcatgttggccaggatggtctcgatctcttcacctcatgattcacccgccttggcctcccaaagtgctgggattacaggtgtgagccaccgtgcctggccgggatgttaatttctttctttctttctttttttgagacggagttttgctcctgttgcccaggctggagtgcagtggcttaatctcggctcactgcaacctccgcctcccaggttcaagcaattctcctgcctcagcctcctgagtagctgggatgacaggcgcatgccaccatgcccagcttattttttgtatttttagtagagatggggtttcatcatgttggccaggctggtctcgaactcctgacctcaggtgatccacccacctcggccacccaaagggctgggcgtgagccaccgcgcccggccatggatgtttatttctccatttcccatcctcctccctttgtctgtctctctaaccacacacaaatagcacactgttttaagtatagaggctttatcatgtacctcatataacttcatgtaacttcaattctactttctgtctctatgaatacacctattctaggcacctcatataagtggattcatacaatatttgtccttttggtctggcttatctcactccgcatagtgttgaaaaagaaaataaatggcttttatctgaggaatgcaagccttctttatgtgatcaagcccagagaggggttgggatgacacagctgttgtggtggctcatgcctgtaatcccagcactttgggaggcctcggtgggaggattacttgaggcccggagtttgaaactagactgggcaacataactaaaccctctctctataaatttttttttcaattagccaggtgtggtggtgtacaccaatagtcccagctactcagaaggcctaggcggaaggatgcttaagtccaggagtatgaggctgcagtgagctgtgatcatacctctgcattccagcctgggagacagagcaagaccttgtctctaaaaaaaaaaaaaaaaaaaaaaaatgctgggtgcagtggctcacacctgtaatcccagtacttcgggaggccaaggcaggcagatcacttgaggtcaggagttcaagaccagcctagccaacatgatgaaaccctgtctctacttaaaaaaaaaaaaaaaaaaaaaaaaaaaaaggaaagaaaaattagccgggcatggtggtgggtgcctgtaatctcagctactagggaggctgaggcaggagaatcacttgaacccaggaggcagacgttgcagtgagccgagatcccaccactgcactccagcttgggcaacagagggagaccccatctcaaaataaataaataaaaattaaaaaaataaattaaaaattaaaaaaaagaaatgagttttttctgctctaaaatcaaaagtttgcaagctgcattcctttctggaggctctggagaatttgttttttttcattttccaagttggagaagctgcctgcattcctcagctcatgggctcctttcatctttacacccaataatggctggtcgtgtgtttctcacagcacacaattccaacactgactttatgccttcttcctcatttcagaccccatgtgattacattgggtctaactggacaatccagtataattcccctatgttaaggtcagccgattagcaactttaattctacctgttaatttaattccacttgccatgtaacatagcatattcacaagtcccaggaactagcatgtgggtattttggggggaacattatcctgcctactttagatgttgaggtcattcaagaggaaaatgatagttttgttaacatgtgatgttagaacaactgaatttccatctggaaaataataactttgaacattacctcacatacacaaaaactaacttcaagtggatgatagaccaaaaataaaaactaaaactatacaacctttagaataaaacataggagaaattcttcacaacactagaggagtcaaagattgttagaaagaccagaaagcatgaagcacattttaaagatgagaaattggatttcatcagaagtaaaaactgctttttgaaagacatcatgaagaaactgagggctgggcacagtgactcacacctgtaataacacagtgagaccccatctccacaaaacacaagaaaattagttgggggtggtggtgcacacctgcagtcccagctactcaggaggatcgactaaacccaggaggtcaaggctgtggtgagctatgttaacaccactgcactccagactaggcaacagagcaagaccctgtctcaaaaaaaaaaaaaaaaaaaaactgagaaggtaagccccaggcagggagagaatatttgcaatttgcaatatgtatatttggcaaaggacttttacccaaacatataaagaattgttacaactcaataataaccaattttaaaataagaaaattttatttatttatttatttattattattttttgagatgcagttttgctcttgttgccctagctggagtgcaacagtgtgatctcagctcacagcaacctctgcctcccgggttcaagtgattctcctgcagggattacaggcatgcaccgccacgcctggccaatttcgtatttttagtagagacggtgtttctccacgttggtcagggtggtctcgaactcccaacctcaggtgatctgcccgcctcagcctcccaaagtgctaggattacaggcgtgagccactgcgcccagccgaatattttcaatagatgtcacaaaagaagataaaagaatggcaaataagtatatgaaagtatgctaagttcattgacatcaggaaatgcaaattaaaaacataatttgatactactgctcattccttagaatagtcaatagatgcctgatgtggggtttgggaggtggggattgacttaacaatgtggggggcagagggcggtgaataaaaatattctatatccgccgggcgcggtggctcacgcttgtaatctcagcactttgggaggccgaggcgagcggatcacgaagtcagaagttcgaggtcgggagttcgagaccagcctgtgagctcgaaccctgtctctactaaaaatacaaaaattagccaggcatggtggcgggcacctgtaataccagctactcggaaggctgaggcaggagaatcgcttgaacccgggaggcggaacttgcagtgagccgagatctcgccactgcagtccagcctgggtgacagctagactccaactcaaaaaaaaaaaaaaaaaaattctatatccagtaacactaaggataaatgcttgaggggatagacaccctattttacatgatatgattcttacgcattgcatgcctgtatcaaaacatctcatgtaccccatatacaactactatgtacccacaaaaatttaactaaaatgcttaaaaattttttaattttaaaaaatattctatatcctgattacgatggtggtgacaagggtttagacatgcgttgaagcttaccgaacagttcacttaaaatgagtgcattttattgtatctaaattattcttcagtaaagttgatttttaaaaaacatgcacacaaatataatttacaaactataacattagctcgtttatggtgtaccattcagtcacttttagtgtattcagagttgtgcaaacatcattatctaattcaagaagctttgcattaccccaaaaatgaaccctttagctattaccaatcactcacagttccccctaatcctgctagtcctaaaaaactctaacttactccttttccgtagatttgactattttaaatatttcctataaatgcagtcatacagtatgtggcttatccacggatgaaggcaaaaatgacgatttagtcagtctagcattctcagagagcgttataacgcctagtacagtccggggtcctgggtgcgttctgcactgagtcggcttggggcaggaagtcatttaagcgacctccttccacttgccccagcgcctcaccccttcctgctctagactacagttcccaaaaatccttgcggctctagtcaacatctggcccgaagctggcgaccttttcctgtttctcagggaactccctggggttggccggtaccatggaggaagattgtcttcagcgtgcagggccagcgtcctacggcagtttcactctgagcctgtgtctggatcacggagacgcggggtagcggttcggagtgcggagcagggatgtccccgagctgtgcagctgcaagaacccgaaaaaacaggcgccatcttctcggcgcggtcctactccggactgtatttcccagaggcccccgcgagtccagggcagccccttcatttgcctgctggaccctccgcctcaagggtaggggaagtgcgcggtgagcggcctgggtcttgcaggctcggctggggcccgcaggtacgtgcatgggagtttgaagggactgaccaggctggtctggagtgttgggcatgtatgagtgtgtcgggcatgtatgagttggtcgggctgatagagggggtggtggggaggcgggcgcgaggcgtgggcttccgtgtgtgagtgtgaccttatgtgactgtgcctctctgtgtgcgcgggtgtgattgtatatcctcgttgtagttgtgtaattgtaacaatgtaaggctgtatgtgtaggtatgactgtgtcccgtgttgggactgtgattgtgtgtggctgtgtaactttgcgtgacatttgtggagggtgtttgtgtggagagaatctgatgaggctgtgactgtgtgttagtctgaggggtgtgtgtaattgtgtttgtatgactgttagcagcacttaagtgtactggatgccttactgagtaaatctactacccagaaataacccagtaacgtgagaatgtgagagtgtgaccatgtaactttatgtagcactgtgtctgcggttggaaagtgcgtgtaatcgtgccggggtgatatgtgtgtcctagtggtcattgtgttattttgaatgtgtgattgtgtgtagtgctcaataggggtcctggggaggggggaactgtaactttgtgtggctcagtagtgcgtgtggtattgtgactatctgtagcactctggttctgaatggtgctatgtttgaggggtctgtaaatatgctagtgtaacttatcctcaaggtagatgtgggacaatgattgtgtgaccatatatagtgttattgtttgggtgaggcgtgcctgtggaggtctatgtgggtccccatggtggctgggtgactgcagcattgggtagggggtgcttgtgactgtctttgtgactccagctctccctgtgaggtcaggacagattctcgagaggagagacctcacccctctgataccaagaatgctcatgacagcctacacttctctgtttttgttttgttttgttttaaggcggagtttcgctgttgttgcccaggctggagtgcaatggcgcaatctcggctcaccgcaacctccgcctccccggttcaagcaattctcctgcctcagccttcctagtagctgggattacaggcgtgtgtcaccacgccctgctaattttgtattttcagtagagacggggtttctccgtgttggtcaggctggtctcgacctccccacctcaggtgatccgcctgccttggcctcctaaagtgctgggattacaggcgtgagccaccacgccgggccgcctacacttctctgacctcccccatcccttcttctctccatagatagtagctgtagatccaaaatgacctctgatctgctcagtctgggccacaagaaaggcctggcatctcatcattcctttcttcttcagctctgctctcgtcaagagagttacccagaggaagaatggctgttgaccaaaccaaatacaaggtgcattgggtttcctttttgcttctcttctctggatagtcgtggttaacatagagtcaacaagtgacctggttcttacaagtttctattcaagaaaatgatgagaagccttggagtggactcagagatcccagtagtctgttacttctttctacaaaatgttcacttattaatttagaaaatagaacagttttcccagtgtactaaagttttgtttttttaaacacacacacactctcccctcctctgtctcacacacacccacccacacaattccaaagaatttagaaaatagggagttacaaacagcaaatctactacccagaaataacccagtaatattttgatctatttccttctagtaagtttcctatgcacatatacattgttttcaagattggaatcttatgacatttaccatttcatatcttgtattttcactaaaaattatgtatggttcttatatttggttttcttttcttttctttttttttcttgagacggagtctcgctctgttgcccaggctggagtgcagaggcgcgttctcagcgcacccaggctggagtgcaatggctagatctcagctcactgcaacctcccgcctcccgagttcaagcaattctcccgctccagcctcctgagtagctgtgattacaggcacctgccatcatgcctggctaatttttatatttttgtagagatggagtttcactatgttggccaggctgttcttgaactcctgacctcaggtgaggcctcccaaagtgctgggtttacaggtgtgagccactgctcctggcctatatttgtttttttttttgttgttgtttaatccctttatattacgtaatacagaaaaatagttaaaatatagatgtatagtttaagaagtaattataaagagaccctcagcataacaaaaacttgcttcagcagtccagaaaagcccgctagtcctttccccagaataaacttatcctacctccctctttaggcaacacttatcctgactttgataatcgttattttcttcttgactttttaaaaaaagttttgttttgttttgttttttaccacatatctgcttatccctaaacaatatagtttagttttgcctttttaacactatataaattaaattgtactgtatgatgttgttttgagtcttgcctttcttataaaatactatatttgttagcctcactctcgctgctatacatagctgcagttcagacgttggttatttcctgtatgacagggctgctgtgaaaatgtttttacaagtataccagcatatatgcatacctttccaggatataagtgtatgaaggaattgctgggccatacagtatgttttgcatctttaaatttcctagataatgctgaactgatctacaatatagttttataaattaaattcctaccgacagcttataaacattatagtcatcttgtattctaacacatggtcatttggtattctaatctttaatgaatctgctgataccatgatatatcatgttgttttaaaagtataacatacattctggggccaggcatggtgactcatgcctgtaatcccagcactttgggaggcctactgggcagattgcttgagcccaggagtttgagacaagcctgggcaagatggtgaaaccccatctctacaaaaagtacaaaaattaaccaggcatggttacatgctgctattgtcccaggtattcaggggataaggtgggaggattgtttgaacctagggaggttgaggctgcagtgagctgcgattgcaccactgccttccatcctgggcaacagggcaagaccctgtctcaaatatatatatataccatacattctgaaaagtacaaaatcaaggtatatgacctgatgacttgtataaaagtgagcatattccgggctgggcgcggtggctcgtgcctgtaatcccagcactttgggaggccaaggcaggcagatcatgaggtcaggagatcaagaccatctggctacggtgaaaccccgtctctacttaaaaaaaaaaaaaaaatacaaaaaattagccgggcatggtggcggccgcctatagtcccagctacttgggaagctgaggcgggagaattgtgtgaacccgggaggtggagcttgcaatgagccaagattgtgccaccgcactccagcctggccgacagagcgagactctgtctcaaaaaaaaaaaaaaaaaagaaaaagcatattcctttgaccagatctcaaatctgataaggaaataaaacataactggcattacagaagcccaagtcttgtccagttcactcactacccacttctcctaaagagaactaatagtttgtcttctatagccatagactaattttacctatacttgaattttgcttggcttctttttttttcactttttttttcctactgtcagtttcacttggagatgatgcttggcttcttttgctcaatattgtatttcgtatgtaatatgaatgtattctgtaataatatgtagtataaatatataaaattcatccatgttgctgcacgttagttataggtgatataatgaatatagtgaacacattattattgctgtttaaaattctgttgtatgaatataacacttttttttgtttttgagacagtttcgctcttgttgcccaaggtggagtacaatggcaccatctctgctcaccacaacctccacctcctgggttcaagcgattctcctgcctcagcctctcaagtagctgagattacaggcgcacgccaccacacccagctaattttttgtatttttaatacaaacggggtttcaccatgttagccaggctggtctcaaactcctgacctcaggtgatccgcccgcctcggcctcccaaagtggtgggattacaggtgtgagccaccgtgcccggccgaatataacacattttacttatccattccattactgattggcatttgatttcatattgaggctgttatgaaaaacgctgccgggaacattcttttacatgtcttttggtgcacatatgaatgcatttgtcttgggtgtatttctaggagtgaaattgctgggtcatggtttctgtatatgttcagctctaatagatactgacagttttctgaaatagtggtatcaatctatattccaaactgcagtgtagactttatgacaagaatagattttacaacaagaagctttactagagataaagaggaatagtttataataaaaagatcaattcaccagtaagatataacagttctgaatttatatgccttcataaaatggcttcaaatatatttgacataactaaaagaagtagtagataaatcacaatcttagtggggagtttttagcactcttctcaatagctgacagaacaagtgacaaacccaataaagctatatggtatttgaacagtgtgattgacaagcttgacctgattgatatgtatagaacagtgtaccttacaactacataatatacttgcttttcaaatgcatatgagacatttatccaaattgatcatatgctgggccacaaagggagtctcaataaatttcaaaggaatgaaataatactgtaactttcctgaccacagtaggttaagctagaagtcaataacaagaagataattggaaatatcccagccaggtgtggtgactcatgcctgtaatcccagcactttaggaaaccgaggcaggaggattgcttgaacccagaagttttaggccaccctgggcaatatagcaagaccccatttctaaatttaaaaaaacaaaaattaaagaaatatcccaatgtttgggatttaagcaatgtatttataaataactggtgactcaaagaataaattgtgatagatatttaaaatattttaaactgagtgataatgaaaaataacataccaaaattatgtttctaaagctgaatatgaggaaaatatatagctgtaaatgcatatgttagaaaaaaatgaatgttggccgggcgcagtggctcacacctgtaatcccagcactttgggaggcccaggctggtggatcacgaggtcaggagttcaagactagcctggccaagatggtgaaaccccatctctactaaaaatacaaaaaaaagtagccaggtatggtggcgggcacctgtaatctcagctactcaggaggctgaggcagagagttgcttgaacctgggaggcagaggttgcagtgagccaagatcgcgccactgcactccagcctgggcggcagagtgaggctccatctcagaaaaaaaaaagaaaaaaattaatgttgaaaaattaatgatctatgtattcatctcaagaagctaaggaaaagtctagaaagttaaacccccaaaattaaaatctaggaaataataagaataaaagcccaaatataaaatttttagtttatttggtattgcatatatttaaggtgtacgtgttttgctgtacataacgaacatatattgaaatacaaaatgaatgtacagtgaagaaaactaacaaaggcaaaagcttatttttgggaattaataaaattaataaatctctaacaaaacttaaaatatgaagtaacacaaaaattgccaatatctgataagaggaaaattaaaccaaccacagacttaacttaaaggctgagggctcaattaattaattagtgtttggtacctgggacttggttccacaaaataagctcattggaatctgagccactgatcattatactgggtccctttttatacttcattgaacatgtagatttttctggttttttgtttttttctttttttgagagacgggcctctcactctgtcacccaggctggagtgcagtggtgcagtcacagctcactgcaaactcgaccttccaggctcaggtgattgtcccatcacagcctcccgggtagctgggactacagacaatgtgccaccatgcccagctagcttttttttttttttcaatgattttgttttcattttaattgtggtataaaagacaatgtaaaatttaccatcttaatctttgtttttttttttttagacggagtctcactctgttgcccaagctggagtgcagtggcatgatctcagctcactgcagcctctgctttccgggttcaagcgattctcttgcctcagcctcctgagtagctgggattacaggtgggtgccaccatgcctggctaatttttgtgtttttagtagagacggggtttcaccatattggtgaggctggtcttgaactcttgacctcgtgatcacctgccttggcctcccaaagtggtgggattacaggcatgagccactacgcctggccatcttaataattttttttttgagatgagttttgatcttgttgcccaggctgaagtgcaatggtgcgatcttggctcactgcaacctctgcctcccaggttcaagtgatctcctgcctcagcctcccgagtagctgggaatacaggcatgtgccaccaagcccaggtaattttgtatttttagtagagacagggtttctccatgttggtcaggctggtcccgaactcccgacctcaggtgatccacctgccttggcctcccaaagtgctgggattacaggtgtgaaccaccacaccaagctaatcatttttaaatgtacattccagtgttaagtatattcatattgtacaatagatctttagaactttttcatcttgcaaactgaattataactattaagctacaatgtcccatttccctctttccccagcccctggcagccactgttctactttctgtttctatgagtttgactaccttagatacctctgtaagtggaatcatttataatagtatttgtctttttgtgactggcttctttccagtcacaataccccaagatagaaaggggattcactgcagttagtcagtagacacacacaaacccaagtagtaacgggatacaatataataatgaattagttgaatgctttgataaattagtttgacatgttactttttattatcattcagtttaaattttttttttttttttgagaaggagtctcgctcttgtcaccaggctggagtgcaatggtgcgatctcaggtcactgcaacctccgcctcctgggttcaagcgattcccctgtctcagcctcccaagtagctgggactacaggcgcgcaccaccatgtctaactaacttttttttttttttttgtattttagtagagacggggtttcaccatgttgcccaggatggtctcgatctcctgacctcgtaaaatatttttaacttccattgcaatttattctttgaaccaccagttatttataaatacattgcttgaatccctgacttagcataatgtcctcagggttcaaacatgtagcatgtgacaggacttacttttttgtagttgtttatttgttttaatatgctttattttttagggtacttttaggttcacagtaaaattgagcagaaggtacagagatttcccatacacgtctttcccccacacgtatggtctcccccatcatcaacatcctccaccagagtggtacatttattacaactaatgaacccacatggacactcagagtctatagtttacattagggttcactcctggtgttacacatccaggggtttggacaaatgtgtaatgacatttatctccattatgatgtcatccacattaattccattgctctaaaaggcctctgtgccctgactgatcctccctccctgtcaactcctaatctttttattgtctccatagttttgccttttccagaatgttgtaatcatacagtatgtagtctttttgaattggcttctttcacttagcaatgtgcatttaagtttcctaagctgttgatcatgagactgagtccctttttatacttcaacagacatgtaagtttctatttttaatatagattttaatttttgtaagttcatttattggacaagatgtgtgctttaaatttttgcatggtgaaatctgcagtttcactataagatatattgacctggggtagtcgtatttttaaaatttatttatttattctttttttgagatgtagtcttgctctgttgccaggctagaatgcagtggtacgatctcagctcactgcaacctccgcctcctggtcctcctgcctcagcctcccaagtagctgcgactacaggcgtgcgtcaccatgcccagctaatttttgtatttttagtaaagacagaatttcaccatgttggccaggatggtcttgatctgttgacctcgtgatctgcccgcctcggcctcccaaagtgctgggattacaggcatgagccactgcacccagccaggctttttttttttttttttttttgagacagagcttcgctcttgttgcccaggctggagtgcaatggcgcaatctcggctcaccgcaacctccgcctcccaggttcaaacgattatcctgcctcagcctccctagtagctgggattacaggcatgtaccaccacgcccggctaattttgtatttttagtagagacggggtttctctgtgttggtcgggctggtcttgaactcccgacctcgggtgatcagcctgcctcggcctcccaaagtgctgggattacaggcatgagccaccgcgcccagccatccggccaggcattttttaaaaaacttaaatctcccttgttaatatcactatataattattaggggtttaatattgctaatagaatgtttacttcctaggcgataccagccctgcagggcctgtgggattttctctttgtgtgtggagacgagagattgtagaaataaagacccaagacagagatagaagaaaagacagctgggcctgagggaccactatcaccaagacacagagaccggtattggccccgaatgcctggtcgcgctgttatttattgtgtataaggcaaaggggcagggtatggagtgagagtcatctccagtgatcggtaaggtcgcgtgagtcacgtgtccaccagacagggggcccttccctatttggtagccgaggcagagagagagaggggacagtttacgtcataattttttaaatgtattttaaagactttagttttgttactgtcaaacaaaatttgtaactaattttgttactgttatttagaaggcagagccaggtgtacagggcggaacatgaaagcggaccaggagcgtgaccgctgaagcacagcatcacaggaagacaggcctctggatggctgtgggcgggcctgactaacgtcaggcgtttttacaagagatggtggagcagagtgttttttaactcccccagggaaagggagactccttttcccggtctgttaagtaacgggtgccttcccagttactggcgctaccgctagaccaaggtcggctaagtaacaggtgccttcccaggtactggcgttaccggtagaccaaggagccctctagtggcccagtctgggcataacagagggctcgcatttttgttttttggtcactttttatcgtgtccctttagtttttatctctgtactgtgttcctttagtttctatctctgtatggcttgggtttttttaggttataattgtagaacaaagattattattggaataaagagtaatgctacaaactaatgattaatatttatatataattataatttatttttagtataactatttttattctatatattttctttattatactaaaacagcttgtgcccttggtctcttcccttaacacctgggtggcttgccgcccagagtatgcaataagctctcatttggaacattcagctaatttgttattttattgtatcccatttctacttggttttgtgtgtgtctactaactgcagtgaatccccttttcatcttgggatattgtgtgaggccactgttgtgatgggtccttctggctttggtacagtttttcctttttctgggactaactggctttttcaaagttcccgagtttattctttttgtcttgggtagatggaaacaagccactaatactagaactataaaaaacaggataagaaaagaacacatatataatccttctctaattattgtatgtaaaaaaaaattattttattcgcccaccttttttgtgcactttataacaatttttttcttacatattattatggacttagagcatttcatagctatttcaactgactgatagctgttaaagactctatcacagtgtggaggagtggcagaagtattctgtttattgttgtgtaagttttcattagttggctaatgggatccccttttaggagactcttaaaaggagttctttcagcacagatatttttaaaaacagcctcaccttttggcaatggcaaaaggttgaattttttttttttttttttttttttgagacagagttttgctcttgttgcccaggctggagtgcaatggcgtgatctcggctcattgcagtctccacctcctgggttcaagtgattcttctgcctcagcctcccgagtagctaagattacgggcatgtgtcaccatgcatggctaattttgtattttttttttttagtagagacggtttctccatgttgatcaggctggtctcgaactcccgacctcaggtggtctacttgcctcagcctcccaaactgctgagattacaggctgtgagccactgcacccagcttttttttttttttttttgagtcagagtctcaccctgtcacccaggttggagtgcgatggcacaatctcagctcactgcaacctctgcctcccaggttcaagggatttttgtgcctcagcctcccaagtagctgggattacaagcatatatatatatgtgtgtgtgtgtgtgtgtatatatatatatatgtatatatatgtgtgtatatatatgtatgtatatgtgtgtgtatatatatgtatatatatatgtgtgtgtatatatatgtatatatatgtgtgtgtatatatgtatatatgtgtgtatatatgtatatatatgtgtgtgtatatatatatatatatttttttttttttttcaataaaacagagctagaagaattagtgcctgcatccctgtgtgtttaggggtggatgcgggtgttgtgtgtgtgcatgtggtgagtgaagttgactttttgagggttgagaaacaaaaagacttgattagggaagtctttggtctttctgatctgagtgcactgtgttcctggccaaagggcaccatttgtgtgagtctggtttggggacctgagggctgcaaaggaggtcatggtagctcagtcttgggtcatagtaggtcattagctcagggcagaccataatagctcaatcatgggttcagagcaacatcactgaggtgggacaaggtctggcccgaatccgttggctaaggcaggaacttaggttgtttgcatgagggagaatgaatctgagtccttgtcttgctgcagctaaagcctgaggtttgtaggattgaggaaggagtaggatttgttccatattcctactaactggagttgtatctcaagaccaagaaatatggaggtggttttatctgacctctagtgtgatttctagagggttttacttccccagtcatgcaacctcagaacactgtcctttttcaggagaacggcctcaaggaagactaaccatctgcaatactagaagccatggctgaggtgagttgatgctttttcttgccttcctgacatttagtttaaaaaaaaaaaaaagacatgagcatttgctttccttatcctgacatttctggctaacagagttccccttcagaatccttgtccccattttttcttagctagataatcctataccatctctaagtatcccttttatttttataaatcaaccagcattaatattttcattccgtaaatacctgagcatctctttttctgaactctttcccaaggactatgataggggatgaattatctcaaggaagcaagaatagatttgtaaaatgaagttaccctgtctggaccattatttgatgagttgaaggtgtgagttacttagctggaaatatagacaagccaagattatctctacagagtagcattctccagtaagataggatgaagtgtggtgctggtagttccaaatgttggattgttgcaagatctggtttaggcacctttggggatcatggggttggtggctgatacagagctctgcaactctgtaagaacatcctggagagaagtccaatttcaggttggataggaagtttggattgtaaggaatttctgtgaatcattgagttttctgtatctcagaattaaggatagtgataatggatgtttacaatggttcagccaatgcataagtcatgtggatcacactgtcagagctcagaagaaccttttaagtcttatccagtaatatctgtattgtagaaaattctaccagaaaaataattattaaagaatttgtaaaacgccaggtgcagtggctcatgcctgtaatctcagcactttgggaagcagaggcaggcggatcacctgaggtcaggagttagagactgggctggccaacatggtgaaaccccatctctactaaaaatacagaaaattagccaggtgtggtggcacattcctgtagtcccagctacttgggaggctgaggcaggagaatccttgaacctgggaggcagaaattgcagtgagccaagatcacaccactgtactccagcctgagcaacatctcaaaaaaataaaaataaataaaataactttacatataactttatatatctttttcgtagctttgattgatgctctaagatcacatgggggtagtttagaatatattagatgaaggacagctttggacataacacagaccaagagttgagaacttttgcatcaggcacaagcaaactgattatagttgtgttataccagatcatgtagctgctgtgtaacgtgaccttaaatagtcttcctgcataggacgagcaaaaggggatgattcatcaataggatagagatttaagacattctctggctaccccttgcattgttaggtgatgtcttttagcagaattatgaagacctttttctcccttaataaaggagaaaaactgatggcctgagaaatctttctctgcttttcaattttatgaattttttcagaagttataagactattactgaatttttacttatttgataaacattaactatttttgttttggtcagataaattattgacaaaactaattagtatttttttataagtaaaacattttccttttttcctcaaaaaggtttttttgttttttttttttgagacggagtctcactctgtcgcctaggctagagtgcagtggcacgatctcggctcactgcaacctccgcctcccaggttcaagcaattctctgcctcagcctctcgagtagctgtgaccacaggcccctgccaccacgcctggctaattttttcggttttagtagagactgggtttcatcatgttggccagactggtcttgaactcctgacctcgggatccacccaccttcgcaaagtgctgggattacaggtgtgagccaccatgcccggccaaaaatgtttttttcacgtaggtctatatagctaactggtagaccagagaattacctcatcttattttggttttataccaataaaatatatcttggatactcaataaataaatactcaaaaaataaaaaaataaggtcatgatgcataattttattaggatgcacatcgtatctggttctctttctttttgtaatattaccagttattgataatttttagattcattcactaggggttacaagtgatcttttaattctgtcattcttccttcatagattaagtggaatacgtctatctataaagtaaaactttccctcatcaattgtttggttaccctgaaggacagttcatataggaaagaagaatgtttgattctttccatttaattaccagttttccaaataatgagttggcttcttagacttgtccaaaagtgaccaataatgttttaaaatagtgttgtgaactcatggattaaacatttttaatatgatcagtccgttgcagttgtccatataatttgatgtgcaaccaatcctagtgaacacgtattattctcttttataatgctattgtattatattctcttattttttttttaatcctcttgatttctctgcagaaaatagggaaattcatcaaacacaatggaaagtttccttggaagattattatctagtcacacttgcatacagtcccctcttacagcattctacagtttgggattttgtttgtttgtttatttgtttttgtatttatttatttatttatttatttattgagatggagtcttgctctgtcgcccaggctggagtgcagtggtgatatctcagctcactgcaagctccgcctcctgggttcaagtgattctcctgcttcagcctcccgagcagctgggattacaggcgcgtgccaccacgcccagctaatttttttgtatttttagtagagacagggtttcactgtgttagccaggatggtcttgatctcctgacctcatgatctgcctgccttggcctcccaaagttctgggattacaggcgtgagccactgcgcccggctgtttttattttttttttgggatggagtcttgctctcttgcccaggctggagtgcagtggtgccatcttggctcactgcaacctccgcctcccaggttcaagcgattctgctgtctcagactcccgagtagctgggactacaggcgcacaccaccacaactggctaatttttgtatttttagtagagacagggtttcaccatgatggtcaaactggtcttgaactcctgacctcgtgatccgcccgcctcagcctcccaaagtgctgggattaccagtgtgagccaccacaccgggcctgggatttgtttttaatcctatgggaaatgtcctaatagggctttggcatatctttgttccaatttctacattgaggaggggaagaagctttctttttattaaataaaatacacatctttttatttttttaaaattttatttatttattttttcgagacggagtttcgcttttatcgcccaggctggagtgcaatggcgcaatctctgctcactgcaacctccacctcccaggttcaagcgattctcctgcctcagcctcccaagtagctgggattacaggcatgtgtcaccacgcccagctaattttgtatttttagtaaagacggggtttctccatgttggtcaggctggtcttgaactcctgacctcagatgatccacccacctcggcctcccaaagtgctgggattagaggcatcagccaccacgcacggcccacatctattttattaaataggtgcctcaagcattagttgctaatgaaacagaaatacaaatgaaacatctaaatatccaaataccacattttctctagatttcccccaaaatgtgcctcatctccctgtacttttacataatatttctagtatcttcattttgttagttttgcaatgtcactgtcaagatagaattatttgatggcttaagacaacttttattttattttattttattttttgagacagagtcttgctctgttgcccaggctggagtgcagtggcgcgatctcggctcagtgcaagctccgcctcccggattcacgccactctcctgcctcagcctcctgagtagctgaggactacaggcgcccgccaccacgcctggctaatttttttgtatttttagtagagacagggtttcaccgtgttagccaggatggtctcgatctcctgacctcgcgatcagcccgccttggcctcccaaaatgctgggattacaggcatgagccaccacgcccagccaacttttgtaagattttcaaactctaaatttataaatcctattacaaaaaaaaattataataatttgacgtgcaagttgtaacagtattggtcagtgggagtatcttcaagttgcctcctagtcttatcagcatgatcctaacagtttttggttgctttcttgctttttggtataacaagacgttcagactcatcctgtgcattttgtaaaagttgctcttgtggatttcgtgaaatcagttcttttcccaaagaaccttggtttcttttatttgaaaatgatatttagaaaccacaatctaggctgggtacagtggctcatgtcgtaatcccagcactttgagaggctgaggcgggcagatcacctgaggtcaggagttcgagaccagcctggccaacatggtgaaaccctgtctctacttaaaatacaaaaattagctaggtgtggtggtgcgtgcctgtaatccccgctactcgggaggctgaggcaggagaattgcttgaacccaggaggcggaggttgcggtgagccgacatcatgccactgcactctagtctgggtgacaaaagcgaatttctgtctcaaaaaaaaaaaaaaagaaaagaaatcacaatctagactctagggatgctcgttgctactggattagtcattatttctaggccgtttcaatggacagagtcaggaatttgtttaatataaacttcctactcttgcatctatttctgaaatctaaagatacaggttctcagtgacaccaatataatgactcattttgtattaccccacaatacaagcatcgtagtctctgatacatttttttaattacacaagtaatacgtatgtttattgtttcagggatcagtgatgttcagtgatgtgtccatagacttctctcaggaggagtgggactgcctggaccctgttcagagggacttatacagagatgtgatgttggagaactacggcaatctggtttcaatgggtaagggcatctgtaccagtgattcccagttctcctctggaatgtctccttcttccacagtgaatttctcagctgcttttcaggttactagctgaatttctattctttattaccaaacaaatggtttgagctgaaatgaaaaggaagagtgggaaattggcaactccagtgggctgtggttgaagcttcatcttcatctttctttggctgttcctgtagtggcatctcttcctgtgatcatcaagggactggatctcctttacccccagcataaccatgttccatatcttttctcgtgagcaggactttacactcctaagcctcaagtgatctccttattggaacaagggaaagagccctggatggttggcagagagcttacaagaggcctgtgttcaggtaagtgagaaatgaccggacaggagaaagtcacgataggtcagaactcagctggtcagggaggaaacagcacctttgagatgttatccctgaagctcccatcaagaaactaggccagtggagaaaatgaagtccttttagcatagttgttaaataacctgtttcgcccttttcctcacttaccactatttctactactcctctccaatcctcctcttaatttcaagcagaaggtaccttttacttctctaaaaaaaaccctattttacccgtattttagattcagctgcttgctagctttttttactctctctctttttttttctttttttttaaagggtctggctctgtcacccaggctagagtgcagtgacatgatcataacttattgtaggctcaaacttctgggcttaggcagtctccctgcctcagccttccaagtggctgggaccgtaggcctgtgccaccatgcctggctaattctttttcttcttctgcatttttttttttttttgagacggagtctcgctccgtcgctcaggctggagtgcagggtgcgatcttggttcactgcaacctctgcctcccgggttcaggcgattcttctgcctcagcctcctgagtagctgggactacaggcgcatgccaccatgcccagctaatttttgtatttttagtagaggtggggtttcaccatattggccaggctgttcttgaactcctgacctcatgatctacccgcctcagcctcccaaagtgctgggattacaggcatgagccaccgcgtccggcccctcttctgcattttttagacttgtacaggtgttttctactaccactccccaaaataatataattgcgtctgtatacacacatgtgaacacacacacacacacacacacacacacacacacacacacagagacacacacacacacaccccttgcccaagtactggtcttcattatagctgcctgtcagtgacctgttttatcagactgtcttcaatgtttcctttatggaacgttttttaatttcctggtttgtgtaagggaatcttccaggtgctacagtttactaattgtgttacctttacaaattcaaggtccaaaagtggtgctaaaatatatacatatatgacttccacaaagtagagtagtataaaagagaaatgagataaggagtttagcagaaagtcaaaggctaactatgtagaagtggaattaatccctattgaagtagtaggtggagccttggaagtgactgcaatcactatgtatagagatattgttggggccaagaaaaaaaaaggatctgtgcctatattaaaaaggaagaggtggcagagcaggagagatttgggatgaagtaggagaaccagaagagtacttattgagcactactatgtaccaagcattggtccaagggctgggactgtagtattcatgaaggcattctaaagttctgcacttctgaagcctacattctagagggtaagagagaaaatgtcttagtccattttgtgctgttacagcagaatacctcacatcgagtaatttataaagaacagacatttattttctcatagatctggaggctaagaattctaagatcaaggcactgtcatctgatgagggccttcttgcatcttcgtgtggcagaaggcagtagggcaagagagccaactccttccatcaagccccttcgtaagagcaccgaaacccatccttgagggatgggtccttgaagcccgatcatctcttaaaggcctcacctcttcgtttttggaattttttttttttttttgagacagggtctcactctgtcacccaggctggagtgcagcggcacaatcatggctcaccacagcctcaacctcccgggctcaggtgatcctcccacctcagcctcccgagtagctcggcccacaggcacacgtcaccacgcccagctaatttttctattttttgtagagacagggtttcgccatgttgcccaggctggtctctaactcctgggttcaagcgatccacccaccttggcctcccaaagtgctaggattaaaggcttgagccactgtgtctggcccccacctcttaatactatcacattggcaacagctgaattttgaaggagagacattcaaaccatagcagaagataaacatgaatgtcaagtatatatgtataaaacaatattagcatgacattaatattatatgatatataaatatttttagaattatatatcacttacatttatctacatgtaactaatatattggtatagtataaatatatatcatatattaataatatttctatattattatatgtccatgtgtatatgaaatgtcaggtggtgggtgatagataagtgctgtgaagagaggctagagagggcctctctgatgaggtgttcttttagtgaagacttgaaggaagtgagggaacaggtaatgtaaatatctgctaggagagattcaggcaaagggaacaggaagagccaagtactcgagttcagagctttttggcagccaccattatggctgaaattgaatgagcaaagcgggaattgtagaagaggagatcaggaaagtagcaggcttatgagtgtttgcatgctgggtgcaggtcaggatgggagttggatgtacctgtagatgattttgggtcttgtggaccttgaattttactccgaatgaggtgtaaatccattgaatgatttagcagagtgatattatcatgtttgcaaaggatcattcttgctctaggggttcctaactttggattcctttaggtagaattcagggagtccatgaacttggatgagaagaaaaaaatacatctttttggttttttttgagacggagtctcactctgtcacccaggcttgagtgcagtggtgtgatctcagctcactgtagcctccaccccgcaggttcaagcgattctactgcctcagccttctgagtagctgggattataggcgcctgccactgcgcccggctcatttttgtatttttagtagagatggggtttcaccatctttgccaggctggtcttgaacttgtgacctcatgatccacctgccttggtctcccaaagtgctgggattacaggcatgaaccactgtgcccagaccaaaaatacatctttatatttaataacctctaattgagatataacatttcttcctatcgtgatgtatgggacaaaccatagtagcagtagtagtagtagtagttactgtgactttgacattaatggaaatcacagatacgttcatattattttactgttattgtaggcatattgaaatatttatgctcatcactacttcagaattaatgtagtactaggcttgccactaggtcttgtttaatgttttactagagaagaaaactccaggcagagagaagaacccctgtgaaggttctgatggggaaaagcttggtgtgtttgaaggactaaatgccagtgttggtgggccccatgatcaagtgggagtggagtgtgagtcagggtttggatagacaggcaggagccacagcattcagcctttgcaggagattgtaaggagttcggactttgagcagtggaaacctaagccaaatgatactattccctgaatagattaaagggtgagagagcttggtggggagactggttgaggaggctacttcactggtctgggtaagagttgattctggtttggaagatgacattggcagtggaagacagaagagggcagtttcaaaactttacttgggagcttaactagatgaaagttactgcaagatctgccgggcgcagtggctcacgcctgtaatcccagcactttgggaggccgaggcgggaggatcatgaggtcaggagattgagaccatcctggccaacatggtgaaaccccatctttcctaaaatacaaaaaaattagccgggcgtggtggtgcacgcctgtagtcccagctacttgggagactgaggcaggggaatcgcttgaaccctggaggtgtaggttgcagtgagccgagatcacaccactgcactccagcctggcaacagagtgacactgcgtttcaaaaaaaaaaaaaaagttattgcaagagcatatagagataggaggagaaagattgtgttggaatgaattccctgttcctgttttgagatactccaataggcttcattttgatatcttcaaaccatttaatttgcctaatatccccatttttagtaagaaattgtttcataatacctgaacactttactccaaaacatgtatatacattttcctgtaaccccccagtaatcatgagttaaggattattgcccttttacagatgaagaaatggtagcttagagattaaataattgcttgtgagcacacaacgattaagtatcagaattggcagtcagctctcatcaatctgcttctggttcctgttatctttctatggcagtatgttgtactgtgtcttagtttctttccatcttccttaaactttagctccttctctctcattcactgtggtggtacataagcaagtctcctctcccctaagatcagcatctcaaaattccaaggcaaacaatatttccattgaatccccagcacataaaataattctgagttttcctatctgccacttacacacctacatcaaattagttcaatacattagacttacatctgtctcttccctcatgtgaataacccgctgttaccaattcctttttttttgttgttttgagatggagtctcactctgtcacccaggtggagtgcagtggtgcgatctcagctcacggcagcctctgcctcctgggttcaagcagttcttctgcctcagcctccggagtagctgggattacaggcacgtgccaccatgcctggctaatttttgtatttttagtagagacagggtttcaccatgctggccaggctggtctggagctcctgacctcaggtgatctgcccgcctcgtcctcccaaagtgctgggattacaggtgtgagccaccatgcccagccaccacattcaaattgtatccactgtatcctttattaaagaccttattctgtttccaccccaactgggtttgctgcagttcacttctgacactattcaggatgtggagacctcacagtcttccatagtactgtcctcacctcagatgccagctgcaagtcttgggagtcccccggctacctgcaggtcagccagctaacagcaataaattaaggggtttccaaggtctcaggttcaataatttgttagaatgactcatagaaatcaggaaagctctgtatttaaagctacagttttattaggatacatatttgagcaagatctggaactggacagtttccatgccctctccctgtggagtcagtttgtcactctcctatcacatcagtgcatttaccaaccagaaagctccactgaatttactgcccagcatttttattgaggttttattacacaggcacaattgattaaatctgtgccactcaatctctagcctctctacacttctcagaggtcaagcagctgcaagtcccacccttgtaatcacaagctagtgtttctggtaatcagaccccaccctgaagctttctaaggtcctaccatgaattaccttattagcataacaaagacctcctgtcaggaaattccaagtgtttttgaagctcagtgtggggctttattatacctcagagccaaagaatcttccccatatgcatttatttctctcaggagacctttaatggaggctagaaaatgatccacttcatgttacacatattgtatgatatacttatctcttatgtacacacgcatacttatatagatatatgtatatcatatatatctatataagtatatatatactatatagtatgtctatatatactatataaatatatatacttatctatatatactataaagatactatatatagtatagatactatatatactatatagatactatatatagtatagatactatactatatatagtatagtatctatatatactataaaagtatacttatgtacatatatatggccagtcatgttttaatatggaaaatagcccaaccattgtatatttaccagcctttccagttgattctgatccacatccatatttgagtatcattgtagtaacttatttgcgtagttaccttcctctgcttcctgcattatcttactaatttctttgtctttcttgtccattttttcagataacacagatatccttgtgaaccctgtgtcatttacctagtagatactattcttactttaatttttccatttctattataaaagtttaatttttcacaaataggaaaaaagaacatttaccattttattttctttcagatctggaatcgatgtgtgaaaccaagttattatctctaaagaaggaagtttatgaaatagaattatgccagagggagataatgggacttacaaagcatggccttgagtactccagttttggagatgttttggaatatagaagccaccttgcaaaacaactgggatatccaaatgggcattttagtcaagaaatattcactcctgaatacatgcccacatttattcaacagacattccttactctccatcaaataattaataatgaagacagaccctatgaatgtaagaaatgtggaaaggcctttagtcagaactcacaatttattcaacatcagagaattcatattggtgaaaaatcttatgaatgtaaagagtgtgggaaattctttagttgtggttcacatgttactcggcatctgaaaattcatactggcgaaaaaccctttgaatgtaaggaatgtggaaaggccttcagttgtagctcatacctttctcaacatcagagaatccataccggtaagaaaccctatgaatgtaaggaatgtgggaaggcctttagttattgctcaaatcttattgaccatcagcgaattcacactggtgaaaaaccttatgaatgtaaagtatgtgggaaagcctttactaagagctcacaactttttcagcatgcacgaattcatacaggtgagaaaccctatgaatgtaaggaatgtggcaaagcctttacccagagctcaaagcttgttcaacatcagagaattcatactggtgagaaaccctatgagtgcaaggaatgtggcaaagcctttagtagtggctcagcacttactaatcatcagagaattcacactggtgagaaaccctatgattgtaaggaatgtggaaaggcttttactcagagctcacagcttcgtcaacatcagagaattcacgctggtgagaaaccctttgaatgtcttgaatgtgggaaggcctttactcagaactcacaacttttccagcatcagagaattcatacagatgaaaaaccatatgaatgtaatgaatgtggaaaggcctttaataaatgctcaaaccttactcgacatctgagaattcacactggtgaaaagccctataactgtaaggaatgtgggaaggcttttagtagtggctcggatctcattcgtcatcagggaattcatactaataaataataaaaattaaagcccctgtcaccttcctcatattttaaaccaaaaatcatgtctaatagttaccctcttccgtagttttttttaaaactttgtatttaaattttgtatccaaatgtatttcattccaggttataaattcggagtctaaagtgacattccctctctcccccagtcatataccgatgccagctgttctataattctttcattcattgttttgttctactttcttggtgacacattatactcatgtttatatttgcttgtgtttttagagctatcttttctgatctgtgtatttgtgtttgcaccagtatcacactgtttgaattgtgtgacctttaatatttttaaattccttgtggaggtttaactttgtttttgaagttagtgttagtctttttgttttattttattattattattatatgttttttgagacggagtttcactctgttgcccaggctggagtgcagtggcgcaatctcggctcgctgcaacctccacctcccggcttcaagcaattctcctgcctcagactcctgagtagctgggatcacaggcgtgtgccaccacaccctgctaattttctatttttagtagagacagggtttctccatgttggtcaggatagtcttgaactcctgacctcaggtgatccacctgcctcagcctcccaaagtgctgggattacaggcatgagcgattgcacctggctttattttttgttgagacggagtttcgctcttgttgcctaggctggagtgcaatggtgcaatctcggctcgtcacaaccttcgcctcccaggttcaagtggttcttctgcctcagccttttgagtagttgggattacaggcatgtgccacaacacccggctaattttttgtatttttagtagagacggggtttcaccatgttagccaggatggtctcaatctcccgacttcaggtgatccacccgcctcggcctccgaaagtgctgggattacaggcgtgagccactgcggccggtctttttattttacaaatgtacatttttaattgttaagccaaaatcacaaagcaaaaaattacaaactaaaaagccaaaattaattgtaatcatacttatagatggctgctctcaatttggtagagaaaatcgtgctatactttgcttttttaagaaagtgtaattatgatatgcatgctgtacccttaactgcttttatcatgccaaagatttcatgagtgccatttcagtaaatatagatttttattattttcatgacatatttaatgactttaaaatgactattcccattatggttgccactaaatttttgcagctataaaagctgacctcggctgggcacagtggctcatgcctgtaatcccagcactttgggaggccgaggtgggcggatcacaaggtctgaagattaaggccatcctggctaacagtgaaaccccgtctctacttagctgggcgtggtggcatgtacctgtaatcccagctactcgggaggctgagacaggagaattgcttgaacctgggaggcggaggttgcagtgagctgagatggtgccactgcactccagcctgggggacagagtgagattccgtctcaaaaaaacacaaaaactgctgacctcattggatgcttatttttacttttaaaacatttattttaattgctaaaattatctacattttctccttgtgagctgttttgttcccttacatcaatcctaatcccaatgccatactagaaagtaacactgttatgaaagtgttatttatcaatccagatattaattttttgtttgtttgtttttttttttttttgagatggagttcactctgttgcccaggctgaagtgcagtggcacaatctcagttcaccacaactgctgcctcccgggttcaagcgattctcctgcctcagccttcctagtatctgagactacaggcgcacgacaccatgcctggctaatttttgtatttttagtagagacagggtttcactatgttggccaggctggtcttgaactcttgaccttgtgatccacccacctcggcctcccaaagttcggggattacaggtgtgagccactgtgcccggtcaattattttttcttatagctattagtggtgtttttgttttttgagacacagtctcgctctgttgcccaggctggagggcagtggtgcaatctcggctcactgcaacctctgcctcccgagttcaagtgagtcttccgcctcagcctcccgagtagctgggactacaggcgcgcgccaccatgcctagctaatttttgtattattagtagagatggggtttcaccatattggccaggctgctctcaaactcctgacctcgtgatcctcctgccttggcttcccaaagtgctgggattataggtgtgagccaccgcccctggctgttagtggtattttaaaaaattatgtctaggcatctataataaggctgtatgtattggattgctgtgaagagtcaatgaattaataaatgcaaagtacctcaaactgttatcacataatacaggtttagtaaaagttttccactattatcagtgatatactcattatcataagtatcttcattaggatttatggaaaggattttaaccatgttgtttacctttggcaaatttgtaattcatggtggaaaaagagaaacacttgtaatgagtataacgaagcctttccctatcattattattcagtgtggaattttaaaaggaagagaaaaagtatgtgtgcatagtctttgttcagactttatcttttatgctacataaagaataccagtctgaggctgggcgcggtggctcacacctgtaatcctagcactttgggaggccaaggtgggtggatcacttgaggtcaggagctcgagaccagcctggccaacatggtgaaaccccgtctctactaaaaatacaaaaaaaacaaaaacaaaaacaaatagccaggcatggtgttgcatgcctgtaatcctagctactcaagaggctgaggtgggaggattgcttgaacctgggagttggaggttatagtgagctgagattgcaccactgcacactccagactgggtgacagagcgagactctgtcttacaaaataaaaaataaacggttaccaatctgaaaccctgaaaatatgatgagtagtagaaagcacagctgtcaaaaaagcaggaagagattataaaattttttctaatatttccccccaaaatgcagaaaacatactggcaacattatttgaccagaagaagcagtacaataggataaccatcaaatatctgattattaattcaatattccctcttaattaacatgggttaaggaataaatccctaatatatacattatttaaatgtacatgaaaatgaaaacaattgaaaaacctgtgagtggcagtaaaagttgtattggaagttttataacctaatatttgtgcatatattgtaatactaggaagaaaaaatatagaacccaaggaactaaaacaagctgaaatgaattgtgggaggaaggaggtagtattattttaaaaggcagaaataattgaaagaaaaaaactggatctgaatccaaaattgatatttgatggaagagaaaaaaaatgagacaaagtttagtgattccagaggtgaaataaggatgacaaataaacaatattgtatatgagaaattgaaatggctatatatgtaaacttaaaagaactgtgtcatttggggtaatgaaaatgtggcatgggtaaaggttgtacaattttgtttatatactacaggtcactcaactatacactttaaaagggtgaatattatgctgtgtgaatttgatctcaatttaaaaacttaaggctggttgcagtggctcatgcctgtaattccagcactttgggaggctgaggtaggagaatggcttgaggccaggagttcaagaccagtctaggtaacataatgagatccccctcccctcatctctacagaaaaaaaaaaaaattaaaacaacaaacttaaaagttggtattatagacatttttataatatatctgaaaatctggaaaaagtctgtgatttttaataagttgacgacatcagaattaactggaggtgtaaaatcttaatagacctccctccagaataaacttatttaaaaaaataagactggccaggcatggtggctcacgcctgtaatctcagcattctgtgaggccaaggcgggtggatcacctgaggtcggggatttgagaccagcctgaccaacatggagaaaccctgtctctactaaaaatacaaaaaattagccgggcgtggtggctcatgcctgtaatcccggctactcaggaggctgaggcaggagaaaggcttgaacccgggaggcagagattgcggtgagcggggatcatgccattgcactccagcctgggcaacaagagtgaaactctctcaaaaataaataagtgaaataaaatttttcttaaaatatattttaaatgtcaaattgctacactaaaaaagacaccaaggtagagatttttataggtgaaatctatgaaatgtcttaggaaactcttctaggacatagactgagatagcaaattatctatttttaaaatttgtcataatcctgatgttacaacctactagaacccaaaacaatttgtccagaatcagttatgaaaatacagcattataaattagcaaatcaaatctagtaacccattgaaaataaatatttgtcacattctgaatttaggaaaaaacaattctgataaatcaaactttctactttctgaaacttgaaaatcaaattgatttagataagattgtatttcttagtgtctgaactcaggaaccaaatagatgtggatagcatgggatttttggaatacaagataagataatttacatgggattgcaaaagttcaaataactaaagttctgtcaatgaaaatatatgctctaacctcaacatcttctagatgaacccttttttctagcagtatttgacaggatgggatatattttataaataaacttggactattatcctatctgctgcagtatcactgttcattcatttatgccctttacttcctacttgaagggtctttaaacatagccaacatatccaatcattgctgtgcattttggatgagggtggattgcggggctgcattcaaagccatcctgggccacatgcagcctatggagcgtgggttggatgagcttgatgtaccacgttttctttatccagtctaccattgatgggcacctgggttgattccccatcattgctattgtgaatagtgctgcgatcaacatacaagtgcatttgtctttttggtagaatgatttcttttcttttgggtagatacacagtaatgggattgctgggtcaaatggtagctctgttttaagttctctgagaaatctccaggctgcttttcacactggctggactattttatgctctcaccaacagtgtataagcattctcttttctccgcagcctcaccagcatcagttgttttttgactttttgtttgagacagagtctcgctgtgtcacccaggctggagtacagtggcatgatcttggctaactgcaacctccgcctgttgggctcaaacaattctcccactttggcgtcccaagtacctgggattacaggtacatgccaccgcacccacctaatttttgtattttttgtacagatgtggtttcaccatgttgcctaggctggtctcaaactcctgggttcaagcaatcccctaccttggcctcccaaactgctaggattacaggagtgagccacggcacccagcttatatttgtgtatatgttaaattgtatatgttattttatgtatgtgtatatattaagttgtagattcacatatataattatatacacatatattacattatatgcacatatatttgtttactcgtgcaatttgtcccagcagaagtaaaaactcatataagtaaaataatatttacaggccaggcgtggtggctcacatctgtaatcccagcactttgggaggctgaggcgggaggatcacctgaagtcaggagtttgagaccagtctggccaacatggtgaaaccccgtctctactaaaaatacaaaaattagccgggtgtggtggcgcatgcttgtaatcccagctactcaggaggctaaggcaggagaatcgcttgaacccgggaggcagggtttgcagtaagccaagatcacaccattgcactccagcctggggtacaagagtgaaactccatctcaaaaaaaaaaaaaagtattatttttggtgcaaaagtactttaacatcttaaatgctcatataatggaagatactttaactcttagaaagaatgagttagctccctttctactctaaaggtatcctaatatctttgtacctgaagtggtgtctgattcaaattgttatattaaaaaaggaaaatgctttataataataataataataaaagaaactttatatagtagccctcccttatctgcaggagatgtgttctaagacccgcagaggatgtatgaaaccgtggatagtatgacccaattgctgtcgatcagaacacatttctgtttatgttttccaagcacaaatttaatgttttttttttttaatcttaactaagcacttatcacacgtggctgtattttttagagcttggggttcaacaaacaagactagcagaaatttcttttcctccttacactttcacagctagaagatttgttcttaccatagatcttagcaacctcagcacacgacttattttccttattcagtcaagaattttcacattttcacttaaaggaaacactttagggctcctcttctgcatatctaaattgacagcatcactactcttgcattttagggccatcattaggtacaattagcgtcacttaaacacaagcgctgtgatactgcggcagtcagtctgataaccaagttggctactcaccgactaagggtagcgcatacagcgtgcatctgctgaacaaaggggtgttcatatcccaggcagaataaagcaggacagtgagatatttcatcacgctcctcagaacagcccacaatttaaagcttatgaattgtttctttcgggaatcttgcatttaatattttcagaccacaatttactgtgggtaaccgaaactgtgggaagtagaaccatgaataaagggggactactgtatatgcttctgtatgtgtgtaaatacttacatgaatcgtggagaacataatgggaagatgctcatcatcttgttaactcgttatttcaagagtggaactggagggggaatactgcctttcctttatatttatttgtaatatttcattttcattatgaacatgtgttattttagtatttttaaatattaataaagacaggcaaaaacatgtaattttaattcaaggtgaaatcttcaaggcaatcatatataattaaacagagcaaataaaacattctaaatccttgaagggaaaggggaaaagaaagcacaatgtaaaaaccaagtgaatctaaacgcaacaatatatcataatgcctaagttcgtgggaccaattccaatccagtccaaggaagcagagactggcgagcaacattccctttcaggcccctgcagggtcaagagcatgctcctggaatagactgagaaactagggcaggctaagtgaggtgccaggaataaagacaccgcctgactgacacattctccactctccctacacccgctcctctcaccagcgcttccatcaggctccaattcctccctcttcccaagagcctcagattgaaaccttgcaaggaagacacccattctcaaagtcacaggcttggtaatctgagcggcaaaggtgaatgatctcgtgctccccctaatccccactactcccctcgccactgctgcctagcaccagcccctcctccataatttgaactgtcctcccaggacttggaggcgggtcggcccaagcacttcttactggccaacatggagcaaacctcccctctcttgcacatccattggctaaaagatctgtctacttaagtctgactgccaccttcccttctttctgtgctgcctggataggactgtcagctggtcgcgtttcccattggtcaccgtttccggaagcccgcccccacgtttccgggagcccggcggacgctgggtctgcagatgccatccaggcgcacggcgggtatagtggttccgcaaccttgggatgttcggctgagcgcctgcctaacatgggagcgcctgcctaaccctcctgactggagggtcagcggcggggagtcctggccttcaatcggccatcgccacggcagaaactggggcccgggctgcgtccaggcccttccccgtccgtccacaggtctcatgggcgcccggactggggctgatgtagtttcccgacctctgacacataggatctggagattaaaggtataaaaacggggacttttcagcccactcaagtaaaacacccttttatttttcggcaggtgttttgttgcagaatgccctgaggggagggagtgactgctgggtttcggtttataaaataaaataaactcctgatttagattatgtttaatatggctccccaacctttaaaaatcccactttttgccagttgtattatttagtgggatgttgaaggggggggcctgcgcctccacacctgtgggcgtttctcctcaggtgggatgaaagactgagaaaagaaaaagacacagagacaaagtatacagaaagaaaagtgggcccaggggaccagcgctcagcatatggaggacctgcgccagcactggtctctgagttccctcagtatttattgatcattatttttaccatctcagagagggggatgtggcaggacagtagggtaatagtggggagagggtcagcaggaaaacatgtgaacaaaggtctgtcataaacaaggttaagaaaaggtgctgtgctttggtgtgcgcgtacgcaaacatctcggtgcattaaagagcagtattgctgccagcgtgtctcacctccagccttaaggcagttttcacctatctcagtaaatagaacatacaatcgggttttacacggagacattccattgcccagggatgagcaggagacagatgccttcctcttacctcaactgcaaagatgccctcctctttcactaatcctcctcagcacagaccctttatgggtgtccggctgggggatggtcaggtctttccctttgctctgttaccaggctggagtgcagtggcacaatctccactcactgcaatttctacctcccagattcaagtgattctcttacttcagcctcctgagtagctgggattacaggcgcgtgtcaccacgcccagctaatttttgtatttttagtagagatggggtttcaccatgttggccaggatgatctcgatctcttgacctcatgatttgcccgcctcggcctcccaaagtgggttttgattttttttatagtggtaatgattctgtcttcttaactcctttaaaatcttagtcagtgggctgggcgctgtggctcatgcctgtaatcctagcactttgggaggccgaggcgggtggatcacttgaggtcaggtgtctgagaccagcctggccaagatggtgaaaccccatctctactaaaaatacaaaaattagccgggcgtggtggcgggcacctgtaatcccagctacccaggaggctgaggcacgagaatcacttgaacctgggaggtggaggtttcattgagccgagattgtgccactgcactccagcctgggcatagagcaagactcagtctaaaaatatatatatatatatatatatatatatatatatgttggtggatctcttactttcacaggatttatttcatagtgtgaatgagacacctcctataggctccaggttgctaacttcatgaggtgtgaagattcggtgctttataaaacagcccccacattcttcataggcctgtccttaattctcagcacccctctgcttctgacattgtacctaaaattaagttttttgtggttatatgagagctctggaaatgcccagcattagccactaatgtttccgtttgatatttccccatatcttaatagtgaccctcaatccattactcagatgggtgtccttttcttggatgtctggaaactaataccagctatccctgtgacctccctgctgagccaccattttgtcttttctcttttcttgtctacaattgtgttcgtaaccctcagctctttcatgagcagccttgatgctttcgactgcttctaactctgagtttattacccgcagtttccatgagccaagtttaggggcctgtgagaccgtcccatgtaaattttcacattcctctaaccaaaatgtagtgtttccttccatccagaatgtaggccgtagaccccgtgggtatggggcattgttaacagtgagaccacagcagtttttatgtcatctgacagcatctccaaatagccttcatggttgtcactgcttcccaatgacaattccaaataacagttcccagtgatgacttgctacttgatattgttacttaatatgttaaggtggctgttgtaggcactattactgtgtaagaaattacaccaaaatttagtggctcaacacaatcattatgtttgtggattctcatgctcatggtcaagatttcagacagggcacaagagtggcctgctgtctctgtccatgatgtctggcttcagcacggaagactcaacagctgggggctggaaccatttggaggcttgttcccttatatctgatacctggcttgggatgttggaagatggggctcagctgggactgagtgcctacatgtagtgtttccatgtggccttgacttccttacagcctggcagtctcagggtagtcagaattcttaggtggcacaggttcccagggcagatgctgagtggtcttttatgaggtaacacaacaaatccacccaggatcggggagacaggacatcgattctgcctctcaaagggaggagtggccattttttaaaaattgccacagcaacatgcctattaatatatcagaaaaatttgaagtatcctgatagctgcatttctttttttttttttttttttaaacggagtctctctctgtcatccaggctggaggagtgcagtagcacgatctcggctcattgcaacctccgcctcccgggttcaaacgattctcctgcctcagcctcctgagtagctgggactataggcacacgtcaccatgcccagctacttttgtatttttagtagagacagggtttcactatgttggccaggatggtctcgatctcttgacctcatgatctgcccacctcagcctcccaaagtgctgggattacaggggtgagccaccactcctggccaatagctgcatttctaagtaattagtctcctttgaaattctatgaattttatttcctgtagtttacagcattattttgagaagggatcaaagactcttccatatatcagaaggatcctggacagaacaagctcactgccaaccatttcccccaatatatacatgtatatatgtattttttttttttttttttttgagacacagtctcactctgttgcccaggctggagtgcagtggtgcaatcttggctcactgcagcctccgcctcatgggtttgagcgattctcgtgcctcagtcttccaagtagctgggattacagttgtgcaccaccactcctggctcattttttctatttttagtagagactggtttcattgtgttggcagggctagtcttggactcctggtctcagtgatccgcccgccttggcctcccgtagtgctgggattataggcgggagccaccatgcccagtccatttcccccagtatttgaaatgcacagtttctgctctggttcattggtcagggcaggactttctcgtttgccttaaacctaacagtagtttagaaattggcctgtaactttttttggcatgatttccttctgtttgtgctgatatttttctcacctcaataaggataggagcttcttttcctttttttttttttccaggtagaatcatgttttcttttaattgaatacttaactcacaatgtttcctgttttgcagctgctctgctaataattaggttcccacctctcaagatcattaggagcttcttttccaattcctctgttttgcatgcattggaaggtaagtttccttgtaaaccagattttggactctgcaggctttgccaaatggcctttttaccctcatgtatattgcattttctttggatagtctcatggattctcaaggatattgtattcctgtattttaccattcatgagtttagaagtgtgtttactttcctgagttttcattttctttttcttctgtcatatgtaatttacagagcaaatacctaccagaatggataacttgagagatgtggaaagtgagtttctttgcgcttatctagtgagggtgatttttagtcaataagcatttggtatatgcctgggaatccaacagctgctatttagattcagagccagcctttatttatcagctttctgatgctgaacccatcagtgaacttctctgtatatttgattcatcataaggaaaatggtgacgccgagggtgactgatttccaggtttacatcggttgccccaggggaagtgcctggcccccatctggtccttgctgctctaactttgccctgttaattgaagaaatgcaggtataaacacttcctgggttgttgctggcatttattgtcctcacagtttacagagaagcccatattttcagcctcttcctctgctttctgtcatttctgaaccatctcacccgacctggtgtaattttcattgtgtgtgagtttgcacagatgtaatttgggcctacatgtgtccaaagcctaatgcccacctcccacctccactaggatctggagctcaggacccactacctccccggcccactgcaagcttgaacatttgatggtggacacccctccctgactttgtattatggtgggttctcttgggtcttgttctctgtgggtctgtcctgcgctatactgtgtggagccggggggattttccctgtgttcccaaaagagggtcacaaggagtttttgagcaaagaggggctgatagttcttaagggtatcccacagaagggagaggccagacatattcaggaaaatcttgtttttttattcttgtaggtccagattttggatgaatctctatagagattgaacagataaggctcacctttcaatagttacaccaagaaaggcctaggtggtgacttaagctatggttttgggcagcacgagagtggtcaggtggacagtagggaagtctacatgtaacccaaacggaaaagagaaaaggcccctgagaaatcagggcaaagtcccacagtgtctctttccccatagtgtcactggtgtgggggttaccttcccactatgtctcccagaagacatgagggcacagactacagtgcctgtggacagaggagctgtggggatggaagtgtgattgcttcattcaaatgcacgccccggtgcgtgtgcgtctcttctgatgcagctccccatgggtaagctctgtgcttctccacacagtggatcaggagtggaaacattctgtctgtttagcacttgacggtttggtggtgacctgatgtcatggtgataatagaggcaatgatcctaacagcttagaactgttcagcttggccgggcctggtggctcacacctgtaatcccagcactttgggagactgaggtgggggtatcacctgaggtcaggagtttgagaccaggctggccaacatggcgaaaccccgtctctactaaaaatacaaaaattagccgggtatggtggcacacgcctgtaatcccagctacttgggaggctgaggcaggagaatcgcttgaacccggaaggtggaggcttcagtgagctgagatcttgccattgcactccagcctgggtgacggagcgagactctgtctcaaaaaaaaaaaaaaattgttcagcttgtgggtaggtatttgggaaacattatatgtattacctagtcttagttatctgcagtggttttgttattttttgcataaactgctgagaatgtttaataattgtagatgatagatcactagtcactctaaaatcttcccatttcttggtctagagctggggctggatccctcagcaacgaggagacctgaaaactagaggaaaaaaagcaggtcctccctataaaccactcatctgtgctctcttccaatttattctccttttgtgtacatcattttaaggggctataatcatcttgttcagacctcaggatataaaatgacccatctgtagacctccagccgtatcccaaagttgtctgttttgtttttttttgaaattcctgacaagtttcagttgtagctgtgccctgaggaaacattcccgattcccggagtagcttccaggttaaagtcctgtaggcttcttctgtttttagaaattcctatcagagaaagacctgattttggatttttagctttaatgcttgtgaaaagctataaaaataattttctacgcctagctttgaagtactgttagtgagaaattaaaattccttcaggaggattaaactgccatttctgttaccctaattacaaaagttttggttgttagaattttctttactgttcatgaagaagtattttatattttccttcgacattcattctctttagcaggtaattttgaactttagtttcttaaatacccaaatttggtttttcctcagtcttctctctgctacagatttctaacttaacaggaaaggcagttttcctcaaaaagggcaaagaacagcgggaacagtagagggcaccttcaaccccagcatggaattgacgttcctgcttcaaaatgaaccatcacagcaatcttggctttttgatttggaccctcatttctcttataatttgaacttatattggagagaaggggcctgtctcttaagccagctagtttttgtactggatatttatatatcatttcatttgttccttagtgttttttcatttctattatgatttgttctgtgggatgtgacttaccggtgtgtttttcacgtttataaagctgaatacttctgtatgtcagcttagcacccctagcatcagccatgctactctcctgctgtgcatagatgggggcctgtccccctgctgaatctcctgggttcctgctgtcaacacctgaaggtacccaccagatgtgtctgtcacttccctccatccacctctcttgtgtttctcatgtttctgcctccctagagaccatttctctctagagcagtgctttccaatagaaatacaatgccagacacatacgtcattttagattttctagtagtcactttagaaaagttaaaaagaggctgggcatggtagctcacacctgtaatcccagcactttgggaggctgaggtgggcagattagctgaggtcaggagttcgagaccagcctggccaacatggtgaaaccccgtcactactaaaaatacaaaaattagccgggtatggtagcaggtgcctgggattacagcctcccgagtaggctgagacatgagaatcacttgattctgggaggtggaggctgcagtgagccgaggtcatgtgcaccactgcaatccaaccttggcaacagagcaagactttgtctcacacaaaaaaaagaaaagaaagaaaagttaaaagggagcaggtgaaattaataatgtgttttatttcacctaaaatgttagtattatccagaatatcacttcaacgtcttatcaaaataaaaattattaatgagatagtttgcattcttcctcttttttgagatgggctcttgctttttttttggcccaggctggaatgcagtggcaccagcatagctcactgcagcctcaaactcctgggctcgagatcctcctgcctcagccttcctagtagttaggactacaggcacacaccaccatgcccagctaattgtttttcttttttgtttgtttgtttttcttttttttcttttttcttttttttttttttttgagaggaaatctcactctgtcacccagggtggagtgcaatggcatgatctcagctcattgcaacctccgcctcccaggtttaagtgattttcctgtctcagcctcccaagtagctgggactacaggcgtgcaccaccatgcctagctaatttttttgtatttttagtagagacagggtttcactatgttggccaggctggtcttgaactcctgacctcagctgatccacccacctcggcctcccaaagtgctgggattacaggtgtgagccactgcgccaagccttttttttttgagatagggtgatagggtctcactctgtcacccaggctgcagtggtatgatcttggctcactgcaacctctgccttccaggttccagtgatttttcccacctcagcttccctattagctgggactacaggtacacgccaccacacctggccaattttttgtattttttgtatacatagggtttcaccatgttggccaggctggtctcgaactcctgacgtcaagtgatccatctggcttggcctcccaaagtgctgggattacaggcgcgagtcaccgcacttggccttagcaatctttcaagtgctcagcagccacatgtggcagtggctgccttattggacagcgcagctctgaacggtgattttatgtacatccccactgctctctctgcctcctttattcccatctaccccacacccctgatgtctattggagggagtctactgggagtgtggaggctttcctgtccctagcatggatgacatcagcaggtggtgatgaaagtgattaaacagcattctcatcacaaaaaaaagtcaagtatttgaggtaatgggttggttaatttgatttcatcattccacatcgtaatgaaaagtcataccatcattttataccccataaatatatataatttagaagatagataaaaatcagccaaaacaattctttgaaatatttttaagcaaacatgtacaatttatggggtacaatatcatttgttagtatatataatttttttttatggggagtcagttaacacaggaaacagccccttgaaagggagatacccccacacccctggagtagcccctggaggactatcgcctccctctctcctctctttctgtctcatattcctttaatttggagaatcatttccaattccttaacattctggcctgatttttttctgtcttacattcaaaggtcacagttttcctctcaccctcatttcagtcttttcccataagatgtgacatgcctttttgtcttggttgggcatttatttgcaatacaagaatgattgttttctttgatacattaatgacttagatacttttcctagtaaaatgtatcttaacagaattccaaattaattctagacagcatatttttaaaggtgtgtatagagctccttatgtttcttccttgatttttaaaatgacatatttaggtctatatattttaggatataagatctctatgtgttgctttgcttcattgaacatttttggtgattatttttattttctgtgtattttaggatttccattaaactatattctcatttcaaatttctatctgagtgatagaattattttaatgtaggaaaggttcatcaaaaatgggtgtagtgattgtgttctttcctatgctcgaatggaaaatgatgaggggacatgatgttagagttgcagtgagaaggggtggaaaagagggattccagagtgccaggcacacaggttttctggaaggtttacatgaggactgctgtggtttgaatgtgttccccgaagttcatgtgttggaaactcaacccctaatgcaacagtgttgaccagtggaacctttaagaggtgattaggtcatgaaggctctgccctcatgaatggatgaagctagagtgggttagttatcttgggagggggttcctgataaaaggatgaggttggcttccttccctttctctttccccctccccccttcacatgtggtcactctcttgcccttccaccttccaccataggacggcacagtgagaccttcaccagatgcaggcccctcactttcccagtgttcagaaccgtaaaccaagtgaactcttgcttataaatcacccagtctgtggtattctgttatagcaacacaaacggactaagagagggacactcagtgggctcttctctctacttgatggagcactccctgcgtggtgccttgtatttgtagacatgatgctgtaaatgttttttgaatgtcttgaaggcttttgtttgaggagtttacagagaagcccctacaggcttcaggtcccttcttctgttgcttctttgctccttagttcctcccctaacctggtgctaaattagatcatagtgtggtccttggaccaacagtatcaatagcacctgaaagtcatgctggaaatacagattcacaggctgctccccagaatactgaagaagaaactctaggagtgagacccaacaatctgtgtttaacaagtccccaggtgagtctgatgcacacagaaatgtgagctgctgtattagatggtgttgagttcatgccaccggatcactgacacacacgtctgctcactgcttgctctttgcacaggcccctggatcctcctggaatccctgatccctgttgctccctggcggagttttctagtccctcttacttgaagcatgtctttcagagcccggcaccacccaagttgggtatctggtgaattctgtggtctgcatgtccatgtttgtgacattctgggaagggtggcccaggctgtgatttgccatctactgcaggctatggatggtattcagaagggaggggagatgctgtgtgcgtgttctgaagggtttcccactaaacagaccaaccctctccataactatttgatttttactttatctcctcgttgacttcacagtgtcagtgcagtttgtgtaaacatctctacggggtgatgcatgcagataaatgtttatgtgaacatataaagtctgcatgtgtgggtgaacactccacatcaggtcattgtccatcattacatatctgtggtgtctggctcattcctctcattttctgtcattttacctacttttacctgaagtacaatgactatttaataactattaaatgtttcatttcagctacacctctatggtatttttttcacctcatatcataccttcctccctcactggacttcagtgtgggacctgcaggtctcaggccttctgggaagtcccagcttttcttgaatgttctctctctctggccagctcaggctggagcagtgggtgttggtgccatcctgtggctataggtgataagccggctgttcttcactgacctggtcttaccttgaaccctggagttctcacatgcatggatttaaatgctgtgtctttctaagggcacattatggccattttccttatctccctcccaaggggctgtttcctgtatttattgactccctgtttaaaaaaaatatatgtatatatagacaaattggattgtaccccataaactgcatgttttaaaaatacttcaaagaatagtttttcatttttttcttgctggtttttatgtatcttctaaattgtatatatttatggggtataaaatgatgttgtgatttttcaatacagtgtggaatgagaatcaaattaacctatccgttacctcaagtacttgactttttttgtgatgagaaggctgtttatcactttcactcaccagctcctgctgtcttccatgctggggacaggaaaggctccacgcttgactttccctcctgttttcttatctgctgtcaacccctgaatgtaccctccaggattgacttctagaccttctacatctagctcgatcgttgtgcacccaccttcctcccagggactgtccttagggagtgactttatgcacaaacttcacatgctcttcctgcctccttcatccccagaagcccccatctcagccccatctgattatttcctccctctctcatttcctgttatgctgttggttttctaacctgaagggtaacttcttactccttagttttttgccttaatttctaagtcataggctactttcaggctaaaagttttcctccagccatggttttagtctcattctataagtcttgctaggtagtttattcattggaaattttttgtttttgagacagagtctcgctctatcacccaggctgtagtacagtggtgccatctcagctcactgcaacctccggttcccgggctcaagcagttctctttcctcagcctcctgagtagctgggattatgggtgcctgccaccacacccagctaatttttgtatttttagcagagacggcatttcaccatgtcagccaggttggtctcgaactcttgacctcaagtgatccgcccgccttggcctcccaaaatactgggattacaggggtgagtcaccgcaccccaccccttggcactatatttaagtgatgatatttttggacactgaggtagcctcattccacaggtttagatctgaagcattttcactattgcttctttccatgtatttcctggtttgcaggtcagtttcttcttttaattcatcattgacacagtggtttatatggcttttaatttcaaaagattttttaaaatatctttttgccgatttttatctatgttaattttaactagacatgttccctggaaggacatcactagttttttttttttttttccctctgtttataatttaggtggattttcacatctcaagccagctaagagtatgggaaataggactcgttaaagcacaggtatcacacaagtgattcagattcacgagggtaatccagatgaaggtatatcattgtacctggcccgcatcactcaataactgtcacctttgatttattgatttacttgagatggagtttggttctgtccccgaggccggagtgcaatggcgtgatctctgctcactacaacctctgcctcccaggttcagagtgattctcctgcctcagcctctttagctgggattacaggcacccaccaacatgcccagctaatttttgtatttttagtagagaggagctttcaccataatggccaggctggtcttgaacctcaaatgatctgcccaccttggcctcccaaagtgctaggattacaggctggagctacggagcccagcctgtcaccttgatttaaatgaatgcagctttcttggtgtcttgatgtttgtgaatttctgtggagtttgatactgctccttttgctgcttgtttttccagagtccccttatcacttgacgtgctgttatattatgtttgatttattacagataccccatcagcctgagtctcttaaaggcctttatacacatatgtctacacatagggatttggatgatctcgggatcccacatcctcgctgtcccctgtccccccacaacatcccacaccaatacctttctgaagttttctagtccctcctttttgtttgtggtccttaaagcccagccccatgcctgactttggttcccagtgagcattgtacatttgtggatattaaatctttggcaaagtcatttacctgggctggaatagggctcttggctgattctttttcctaaacacccacccaatgggagaggctgatactcaacatgcaaaccttgtgttttatttctccaggcgaagggatgttggaagacattctggaaggggtggggtgtgaagatttacaaataatctttgaatatctgcttcatgataggtcttggaggtgccttgtgggtgtggctttggggggatggttacgaggaaattgtggatattaaggaagtcaggaaaggaaaagatcagtcacaattcaacaattcagagaaagctcctaagggactttctggctgcttgatgcccagaggccaggccctcacttcgtattaaggctcaggactgtggatagagaatttaaaggggcaccaaaaaaacattaaaatagataaacatatttttaatggaatacctttaaaaatgcaaatcaatgcacaaagaaaacgcccatgttgaacaaaatggtgacaattgtgccttctcttcaacaccaccccaccctccagaagtttccttcaagccgtacctgtaagagtaaaaatagagaaaaataaaaacctttaagttaaaagataaaaatgagctgggtgtgggggctcatgcctgtaatcccagcactttgggaggccgaggcaggtggatcacttgaggtcaggagttcgagaccaggctgggcaatgtggtgaaacatcgtctctactaaaaatacaaaaaaacaaaaaaaatttaggtgggcacagtggcaggtgcctataatctcagctacttgggaggctgaggcaggagaatcgcttgaacctgggaggcggaggttgcaatgagccaagagcatgccattgcactacatcctgggagacagatcaagactctgtctcaaaaaaaacaaaacaaacaaacacctcgggaatttctggctcaagcctctgatcctcaccaccactatcaccaggggatcttttgctgttcacccaagtccagccttcatcccctaaactcctggggaaatgcgaccagactctccccatctccattccgggagtttgcctcaagccaatcttgttctccctgaaaacggccttggggttccccatcctggtacaccctcctactctaggggacacagggccgatgttgcccccaaaccggcagtcccaggagcgcatcgcttctccctgaactgcttctgccccaacctggcatctgcttggggaagggcaccccagggtggagacttgcatggtgagctcagctcaccttcaggtgaaggtcagcgcacactggccacccgggaccacattttccagaatcctttggcggtcccgcgatgctctcgtggtcagcagctctcattgggttgcagaggagaaacttgtccgtgtcactggggcatcttaacagtcggctcctaagcttggttgtgtgcgctgtgcagatgtgagaggcacaccgtgtgggcgaacccaactgcttgcctgcctctctagctccaaaactacaatccccagaggcctctgcggtcacttccactacccaccctacacaccttctgtgtgtcgcgttaatgtcagaagcacttctgtttggtggccccggctggttaggctggttggcacccagggaggcacccaggtcttccccacacctctgcacctcattacctgaccggcttctggatccgcagcgtgcatctgcagtctgtgagtcccctataggcactcagtatgcccctctgcgtgtccctctgttactcatggggacacagtctgggagccgtagacctgtctcagaactagggcgccctcctgtgggcacctccaggccattttcctttcactggagcccaccgggttagagacagaccctcactctgttgcttggggacaaaggcttcactccctggcccgagcttggggctgagctagagggttcggggtcatcctgggcccctctggatgggaattggctgccctgttaatttctgtgacatccccgaccctaacagtgggtctctggagcagactgcgcttcaccccatgggaagggggtttccacctgagagtcaaaaaagaggtgagaattctctgtaattccatcttgactgtcaacaggatggattctgttaccatttcttgccctggaggctgccttgttggtattggggaaagttcattcctagtcctggaaaagtggctcattccaactggagtcctccctcagcattcctttctgctgcatccatcctgcagtcattcatgttgttaattgtaaacaaacacacatggaacagtttaaataaaactacacagatgtgtgtgcttaattgttcagtgatgtggatgaagggcagggacagcagagatgcctgtgatttcaagggcttggggaggactcgtacaagtagagctgtctcagctgcccctgaccggtttggtaccttggagattcgggggaaggcattgcactcggaggcagaaggaagcatagtctgaggctgggctcttgctacagggtaggaaggattatggtggccaagagccttcttaaggttgatttttaaatatgcataggtgaagatacagactagctgttcacacatagaataaggagaagctttatagagtgtgacctaaattttacatcacagaacactttcaccttccggcagttgggacatttcacccaaaatttgaaattccctcctactctgaaaatgaatctggcctaactctgcactgatgaattttttttttttttttgagacagttttgtgcttgttacccaggctagagtgcagtggtgcaatctacactcaccgcaacctctgccacacgggttcaaccgattctcctgcctcagcctcccaaatagctgggatttacaggcatatgccaccacaccgcgctaactgtctggtacttttttttagtagacgcggagtttcatcatgttggttaggctggtgtgatcccctgacctcaagtgatccatccgcctcagcctcccaaattgctgggattaaagatgtgagacacctcactttgccagtatgcattgttcttagtgtcagccgctgaaactgctacttctgcgttacgcgactacgagccaccggtgagagagcagcccacgggcacacaggcggacctgtgctcgtcatcacaagggctccacttttggggagactcacccgcacaccgtccgcgcacgcctgaggctgggatcccgcgctgcctcgccggcgatctgtctgaggtttcttcctcctggggtttcttcctgctggtggaccctccgcgaatcccggcctccggagaccgtcctggtaactaccctggccaggactggtctcagcccagactcagacgcacgatcacacagggctgctacttcgccaagtgtcagggacccatccccgggcaacggtggctttcactgtggcccaagcggcggctcgggcctcgcgcatgcgcactggcgaggccgactcccccgctccacccccccttactccgcagagtcaggctgcggaccctttaaaaaatggcggcgacgcggcggctgcggggcctggggcggcggtgctggaggttgcgtcggcggcggcggcggcacagccagaggcggcgggtgggaagaggactgccagaggggcctgcgggagacccagggtcggacccataggagtcctgtggtgaggacctccttgatcgctcttctgcttcggttcccgctgaaggaggagtttcgggatgccggctgggctgcgcggactcctcttggggtccgatgatggatccaaccgggtgatcgggaatggggttccaatgcagtgaggccgaaagggtctcgccggggcacagaaagatccccagggccgcaaggcgtgctgtcggctgcaaaggcaccgacccatgagcccactgcctccctccctcctggcaggagcaggggcctgccttcatctccaaggcccgagggctccggcatcccgacgcggcttccggcgacacgggcaaagagagacagaggcgagtccgagctggagccagcgtgtccacatgtggcactgtcgtcccccaagagcacatgcaggcagcctgtgtctttgaggctgtagggggcgacgacaagacggacagtgatgtccaggcgtgcgcccggggggccactggagaccggccccacaaagcgaggaaaagccaagcgcacctgaaaacctgcgagacagggcctgtgcgcgagtccacgccacgttcagggaggcccgccagaggagccgagaggtttggacaaagtacaccccacccccagcccgccgccggctaggtacccctgacgcaacctcccctgcacccagccaaaacccagtcccgttggctccctgacatccgtggcagccaaaagattcggtgctagaaggcactttccccaggagcggaggaaccggttggccctcaagaatcagagaggaagtgcaggtgggatgcaacaccgcctttcctagaaggccaatgtcaggagcggtgggcttgcctccgcctcttcctggaccgagcgtgcagccatcacttgggccatggagaccgagagagcttccctgtcccacacaggtatggaagcccagagctccaggatcaccacagctgcccaatcatccagaaagaggtgtggagagggaaacaatcatgacgcggaccgccacgaggtttctccctgatggacggggaagtcttctttgtggaagacactgagccacgctaagaagccgccaggcttctcagagacggggcagacacagcaagagggaggtcagagcagaggccagagcccaggcaggatacgggggggccatgccaccaccaccggcatccggggaggagtgtcaaacgggtgactcggccaggaaggccagcctttgagagacagacatgcttgccccatccccttgccggcttccttctccgtccctgcgtcgagctgtggctacatttctcgatgagggcagagggcgacaggcgtgacaaccaccttcttgaagctctgcgggcaccctcctgcgggtggacaatgagcgcctgggaggccgttgtccttggttggggagcgctcgtctggatccagcctagcaaagaggctgctccggatggggaggggatgaaaacccctgcgggttcgacgccgatgcccacgttgcccaggccttcacagacccccaaactggaactgccgggaccacgactgccaaccggccacacgacccaggcagagacgcggggacacgctgaccagaagaaaggccgacgtgcaagaaacccaccctccggcgcacagggcccatgtgtcccaaggcgcacgcacacacagacggacagagacagaaagagagggcgaccgaaagagcgagaagggagagagacaaagagagagagagagagagagagagagagagagagagagagacgtgagagagagacagaagtcggcacacagacacgcactgcgcgcgcacacacacagacaaacacacagacgcatccccccaacacacacacacacacccataacgaacacacacgtacagcagggaacacccacccgcaggcagcccctgaagctgccgggttctgctctccgcgactaagagccaccggtgagagagcagcccacgggcacacaggcggacctgtgctcgtcatcacaagggctccacttttggggagactcacccgcacaccgtccgcgcacgcctgaggctgggatcccgcgctgcctcgccggcgatctgtctgaggtttcttcctcttggggtttcttcctgctggtggaccctccgcgaatcccggcctccggagaccgtcctggtaactgccctggccaggactggtctcagcccagactcagacgcacgatcacacagggctcctacttcgccaagtgtcagggacccatccccgggcaacggtggctttcactttgacccaagcggcggcttgggcctcgcgcatgcgcactggcgaggccgactccccccgctccagccccccttactccgcagagtcaggctgcggaccctttaaaaaatggcggcgacgcggcggctgcggggcctggggcggcggtgctggaggttgcggcggcggcggtggcggcgcagcccgaggcggcgggtgggaagaggactgccagaggggcctgcgggagacccagggtcggacccataggagtcctgtggtgaggacctccttgatcgctcttctgcttcggttcccgcgaaaggaggagcttcgggatgccggctgggctgcgcggactcctcttggggtccgatgatggatccaaccgggtgatcgggaatggggttccaatgcagtgaggccgaaagggtctcgccggggcacagaaagatccccagggccgcaaggcgtgctgtcggctgcaaaggcaccgacccatgagcccactgcctccctccctcctggcaggagcaggggcctgccttcatctccaaggcccgagggctccggcatcccgacgcggcttccggcgacacgggccaagagagacagaggcgagtccgagctggtgccagcgtgtccacatgtggcactgtcgtcccccaagagcacatgcaggtagcgtgtgtctttgaggccgtagggggcgacgacgagacggacagtgatgtccaggcgtgcgcccggggggccactggagacctgccccacaaagcggaggaaaagccaagcgcacctgaaaacctgcgagacagggcctgtgcgcgagtccacgccacgttcagggaggcccgccagaggagccgagaggtttggacaaagtacaccccacccccagcccgccgccggctaggtacccctgacgcaacctcccctgcacccagccaaaacccagtcccgttggctccctgacatccgtggcagccaaaagattcggtgctagaaggcactttccccaggagcggaggaaccggttggccctcaagaatcagagaggaagtgcaggtgggatgcaacaccgcctttcctagaaggccaatgtcaggagcggtgggcttgcctccgcctcttcctggaccgagcgtgcagccatcacttgggccatggagaccgagagagcttccctgtcccacacaggtatggaagcccagagctccaggatcaccacagctgcccaatcatccagaaagaggtgtggagagggaaacaatcatgacgcggaccgccacgaggtttctccctgatggacggggaagtcttgtttgtggaagacactgagccacactaagaagccgccaggcttctcagagacggggcagacacagcaagagggaggtcagagcagaggccagagcccaggcaggatacgggggggccatgccaccaccaccggcatccggggaggagtgtcaaacgggtgactcggccaggaaggccagcctttgagagacagacatgcttgccccatccccttgccggcttccttctccgtccctgcgtcgagctgtggctacatttctcgatgagggcagagggcgacaggcgtgacaaccaccttcttgaagctctgcgggcacccttcctgcgggtggacaatgagcgcctgggaggccgttgtccttggttggggagcgctcgtctggatccagcctagcaaagaggctgctccggatggggaggggatgaaaaccctgcgggtccgacacccatgcccacgttgcccaggccttcacagacccccaaactggaaccgccgggacgacgactgccaaccggccacacgacccaggcagagacgcggggagacgctgaccagaagaaaggccgacgtgcaagaaatccaccctccggcgcacagggcccatgtgtcccaaggcgcacgcatacacagacggacagagacagaaagagagggcgaccgaaagagcgagaagggagagagacagagagagagagagagagagagagagagagagagagagagagacagaagtcggcacacagacacgcactgcgcgcgcacacacacagacacacacacagacgcatccccccaacacacacacacacacccataacgaacacacacgtacagcagggaacacccacccgcaggcagcccctgaagctgccgggttctgctctccgcgactaagagccaccggtgagagagcagcccacgggcacacaggcggacctgtgctcgtcatcacaagggctccacttttggggagactcacccgcacaccgtccgcgcacgcctgaggctgggatcccgcgctgcctcgccggcgatctgtctgaggtttcttcctcctggggtttcttcctgctggtggaccctccgcgaatcccggcctccggagaccgtcctggtaactaccctggccaggactggtctcagcccagactcagacgcacgatcacacagggctgctacttcgccaagtgtcagggacccatccccgggcaacggtggctttcactgtggcccaagcggcggctcgggcctcgcgcatgcgcactggcgaggccgactcccccgctccacccccccttactccgcagagtcaggctgcggaccctttaaaaaatggcggcgacgcggcggctgcggggcctggggcggcggtgctggaggttacgtcggcggcggcggcggcacagccagaggcggcgggtgggaagaggactgccagaggggcctgcgggagacccagggtcggacccataggagtcctgtggtgaggacctccttgatcgctcttctgcttcggttcccgctgaaggaggagtttcgggatgccggctgggctgcgcggactcctcttggggtccgatgatggatccaaccgggtgatcgggaatggggttccaatgcagtgaggccgaaagggtctcgccggggcacagaaagatccccagggccgcaaggcgtgctgtcggctgcaaaggcaccgacccatgagcccactgcctccctccctcctggcaggagcaggggcctgccttcatctccaaggcccgagggctccggcatcccgacgcggcttccggcgacacgggcaaagagagacagaggcgagtccgagctggagccagcgtgtccacatgtggcactgtcgtcccccaagagcacatgcaggcagcgtgtgtctttgaggccgtagggggcgacgacgagacggacagtgatgtccaggcgtgcgcccggggggccactggagacctgccccacaaagcggaggaaaagccaagcgcacctgaaaacctgcgagacagggcctgtgcgcgagtccacgccacgttcagggaggcccgccagaggagccgagacgtttggacaaagtacaccccacccccagcccgccgccggctaggtacccctgacgcaacctcccctgcacccagccaaaacccagtcccgttggctccctgacatccgtggcagccaaaagattcggtgctagaaggcactttccccaggagcggaggaaccggttggccctcaagaatcagagaggaagtgcaggtgggatgcaacaccgcctttcctagaaggccaatgtcaggagcggtgggcttgcctccgcctcttcctggaccgagcgtgcagccatcacttgggccatggagaccgagagagcttccctgtcccacacaggtatggaagcccagagctccaggatcaccacagctgcccaatcatccagaaagaggtgtggagagggaaacaatcatgacgcggaccgccacgaggtttctccctgatggacggggaagtcttgtttgtggaagacactgagccacgctaagaagccgccaggcttctcagagacggggcagacacagcaagagggaggtcagagcagaggccagagcccaggcaggatacgggggggccatgccaccaccaccggcatccggggaggagtgtcaaacgggtgactcggccaggaaggccagcctttgagagacagacatgcttgccccatccccttgccggcttccttctccgtccctgcgtcgagctgtggctacatttctcgatgagggcagagggcgacaggcgtgacaaccaccttcttgaagctctgcgggcaccctcctgcgggtggacaatgagcgcctgggaggccgttgtccttggttggggagcgctcgtctggatccagcctagcaaagaggctgctccggatggggaggggatgaaaacccctgcgggttcgacgccgatgcccacgttgcccaggccttcacagacccccaaactggaactgccgggacgacgactgccaaccggccacacgacccaggcagagacgcggggacacgctgaccagaagaaaggccgacgtgcaagaaacccaccctccggcgcacagggcacatgtgtcccaaggcgcacgcacacacagacggacagagacagacagagagggcgacggaaacagcgagaagggagagagagagagagagagagagagagagagagagagagagagagagagaggtgagagagagtcagaagtcggcacacagacacgcactgcgcgcgcacacacacagacacacacacagacgcacccccccaacacacacacacacacccataacgaacacacacgtacagcagggaacacccacccgcaggcagcccctgaagctgccgggttctgctctccgcgactaagagccaccggtgagagagcagcccacgggcacacaggcggacctgtgctcgtcatcacaagggctccacttttggggagactcacccgcacaccgtccgcgcacgcctgaggctgggatgccgcgctgcctcgccggcgatctgtctgagttttcttcctcctggcgtttcttcctgctggtggaccctccgcgaatcccggcctccggaaaccgtcctggtaactgccctgaccaggactggtctcagcccagactcagacgcacgatcacacagggctcctacttcgccaagtgtcagggacccatccccgggcaacggtggctttcactgtgacccaagcggcggcttgggcctcgcgcatgcgcactggcgaggccgactcccccgctccacccccccttactccgcagagtcaggctgcggaccctttaaaaaatggcggcgacgcggcggctgcggggcctggggcggcggtgctggaggttgcggcggcggcggtggcggcgcagcccgaggcggcgggtgggaagaggactgccagaggggcctgcggcagacccagggtcggactcataggagtcctgtggtgaggacctccttgatcgctcttctgcttcggttcccgctgaaggaggagcttcgggatgccggctgggctgcgcggactcctcttggggtccgatgatggatccaaccgggtgatcgggaatggggttccaatgcagtgaggccgaaagggtctcgccggggcacagaaagatccccagggccgcaaggcgtgctgtcggctgcaaaggcaccgacccatgagcccactgcctccctccctcctggcaggagcaggggcctgccttcatctccaaggcccgagggctccggcatcccgacgcggcttccggcgacacgggcaaagagagacagaggcgagtccgagctggtgccagtgtgtccacatgtggcactgtcgtcccccaagagcacatgcaggccgcgtgtgtctttgaggccgtagggggcaacgacgagacggacagtgatgtccaggcgtgcgcccggggggccactggagacctgccccacaaagcggaggaaaagccaagcgcacctgaaaacctgcgagacagggcctgtgcgcgagtccacgccacgttcagggaggcccgccagaggagccgagacgtttggacaaagtacaccccaccctcagcccgccgccggctaggtacccctgacgcaaactcccctgcacccagccaaaacccagtcccgttggctccctgacatccgtggcagccaaaagattcggtgctagaaggcactttccccaggagcggaggaaccggttggccctcaagaatcagagaggaagtgcaggtgggatgcaacaccgcctttcctagaaggccaatgtcaggagcggtgggcttgcctccgcctcttcctggaccgagcgtgcagccatcacttgggccatggagaccgagagagcttccctgtcccacacaggtatggaagcccagagctccaggatcaccacagctgcccagtcatccagaaagaggtgtggagagggaaacaatcatgacgcggaccgccacgaggtttctccctgatggacggggaagtcttctttgtggaagacactgagccacgctaagaagccgccaggcttctcagagacggggcagacacagcaagagggaggtcagagcagaggccagagcccaggcaggatacgggggggccatgccaccaccaccggcatccggggaggactgtcaaacgggtgactcggccaggaaggccagcctttgagagacagacatgcttgccccatccccttgccggcttccttctccgtccctgcgtcgagctgtggctacatttctcgatgagggcagagggcgacaggcgtgacaaccaccttcttgaagctctgcgggcaccctcctgcgggtggacaatgagcgcctgtgaggccgttgtccttggttggggagcgctcgtctggatccagcctagcaaagaggctgctccggatgtggaggggatgaaaacccctgcgggttcgacgccgatgcccacgttgcccaggccttcacagacccccaaactggaactgccgggacgacgactgccaaccggccacacgacccaggcagagacgcggggacacgctgaccagaagaaaggccgacgtgcaagaaacccaccctccggcgcacagggcacatgtgtcccaaggcgcacgcacacacagacggacagagacagacagagagggcgacggaaacagcgagaagggagagagagagagagagagagagagacagagagagacgtgagagagacacagaagtcggcacacagacacgcactgcgcgcgcacacacacagacacacacacagacgcacccccccaacacacacacacacacccataacgaacacacacgtacagcagggaacacccacccgcaggcagcccctgaagctgccgggttctgctctccgcgactaagagccaccggtgagagagcagcccacgggcacacaggcggacctgtgctcgtcatcacaagggctccacttttggggagactcacccgcacaccgtccgcgcacgcctgaggctgggatcccgcgctgcctcgccggcgatctgtctgaggtttcttcctcttggggtttcttcctgctggtggaccctccgcgaatcccggcctccggagaccgtcctggtaactgccctggccaggactggtctcagcccagactcagacgcacgatcacacagggctcctacttcgccaagtgtcagggacccatccccgggcaacggtggctttcactttgacccaagcggcggcttgggcctcgcgcatgcgcactggcgaggccgactccccccgctccagccccccttactccgcagagtcaggctgcggaccctttaaaaaatggcggcgacgcggcggctgcggggcctggggcggcggtgctggaggttgcggcggcggcggtggcggcgcagcccgaggcggcgggtgggaagaggactgccagaggggcctgcgggagacccagggtcggacccataggagtcctgtggtgaggacctccttgatcgctcttctgcttcggttcccgcgaaaggaggagcttcgggatgccggctgggctgcgcggactcctcttggggtccgatgatggatccaaccgggtgatcgggaatggggttccaatgcagtgaggccgaaagggtctcgccggggcacagaaagatccccagggccgcaaggcgtgctgtcggctgcaaaggcaccgacccatgagcccactgcctccctccctcctggcaggagcaggggcctgccttcatctccaaggcccgagggctccggcatcccgacgcggcttccggcgacacgggccaagagagacagaggcgagtccgagctggtgccagcgtgtccacatgtggcactgtcgtcccccaagagcacatgcaggtagcgtgtgtctttgaggccgtagggggcgacgacgagacggacagtgatgtccaggcgtgcgcccggggggccactggagacctgccccacaaagcggaggaaaagccaagcgcacctgaaaacctgcgagacagggcctgtgcgcgagtccacgccacgttcagggaggcccgccagaggagccgagaggtttggacaaagtacaccccacccccagcccgccgccggctaggtacccctgacgcaacctcccctgcacccagccaaaacccagtcccgttggctccctgacatccgtggcagccaaaagattcggtgctagaaggcactttccccaggagcggaggaaccggttggccctcaagaatcagagaggaagtgcaggtgggatgcaacaccgcctttcctagaaggccaatgtcaggagcggtgggcttgcctccgcctcttcctggaccgagcgtgcagccatcacttgggccatggagaccgagagagcttccctgtcccacacaggtatggaagcccagagctccaggatcaccacagctgcccaatcatccagaaagaggtgtggagagggaaacaatcatgacgcggaccgccacgaggtttctccctgatggacggggaagtcttgtttgtggaagacactgagccacgctaagaagccgccaggcttctcagagacggggcagacacagcaagagggaggtcagagcagaggccagagcccaggcaggatacgggggggccatgcctccaccaccggcatccggggaggactgtcaaacgggtgactcggccaggaaggccagcctttgagagacagacatgcttgccgccccatccccttgccggcttccttctccgtccctgcgtcgagctgtggctacatttctcgatgagggcagagggcgacaggcgtgacaaccaccttcttgaagctctgcgggcaccttcctgcgggtggacaatgagcgcctgggaggccgttgtccttggttggggagcgctcgtctggatccagcctagcaaagaggctgctccggatggggaggggatgaaaacccctgcgggttcgacgccgatgcccacgttgcccaggccttcacagacccccaaactggaactgctgggacgacgactgccaaccggccacacgacccaggcagagacgcggggagaggctgaccagaaggaaggccgacgtgcaagaaacccaccctccggcgcacagggcacatgtgtcccaaggcgcacgcacacacagacggacagagacagacagagagggcgacggaaacagcgagaagggagagagagagagagagagagagagacagagagagacgtgagagagagacagaagtcggcacacagacacgcactgcgcgcgcacacacacagacacacacacagacgcatccccccaacacacacacacacacccataacgaacacacacgtacagcagggaacacccacccgcaggcagcccctgaagctgccgggttctgctctccgcgactaagagccaccggtgagagagcagcccacgggcacacaggcggacctgtgctcgtcatcacaagggctccacttttggggagactcacccgcacaccgtccgcgcacgcctgaggctgggatgccgcgctgcctcgccggcgatctgtctgagttttcttcctcctggggtttcttcctgctggtggaccctccgcgaatcccggcctccggagaccgtcctggtaactgccctggccaggactggtctcagcccagactcagacgcacgatcacacagggctcctacttcgccaagtgtcagggacccatccccgggcaacggtggctttcactgtgacccaagcggcggcttgggcctcgcgcatgcgcactggcgaggccgactcccccgctccacccccccttactccgcagagtccggctgcggaccctttaaaaaatggcggcgacgcggcggctgcggggcctggggcggcggtgctggaggttgcggcggcggcggtggcggcgcagcccgaggcggcgggtgggaagaggactgccagaggggcctgcgggagacccagggtcggacccataggagtcctgtggtgaggacctccttgatcgctcttctgcttcggttcccgcgaaaggaggagcttcgggatgccggctgggctgcgcggactcctctcggggtcggatgatggatccaaccgggtgatcgggaatggggttccaatgcagtgaggccgaaagggtctcgccggggcacagaaagatccccagggccgcaaggcgtgctgtcggctgcaaaggcaccgacccatgagcccactgcctccctccctcctggcaggagcaggggcctgccttcatctccaaggcccgagggctccggcatcccgacgcggcttccggcgacacgggcaaagagagacagaggcgagtccgagctggtgccagcgtgtccacatgtggcactgtcgtcccccaagagcacatgcaggcagcgtgtgtctttgaggccgtagggggcgacgacgagacggacagtgatgtccaggcgtgcgcccggggggccactggagacctgccccacaaagcggaggaaaagccaagcgcacctgaaaacctgcgagacagagcctgtgcgcgagtccacgccacgttcagggaggcccgccagaggagccgagaggtttggacaaagtacaccccacccccagcccgccgccggctaggtacccctgacgcaacctcccctgcacccagccaaaacccagtcccgttggctccctgacatccgtggcagccaaaagattcggtgctagaaggcactttccccaggagcggaggaaccggttggccctcaagaatcagagaggaagtgcaggtgggatgcaacaccgcctttcctagaaggccaatgtcaggagcggtgggcttgcctccgcctcttcctggaccgagcgtgcagccatcacttgggccatggagaccgagagagcttccctgtcccacacaggtatggaagcccagagctccaggatcaccacagctgcccaatcatccagaaagaggtgtggagagggaaacaatcatgacgcggaccgccacgaggtttctccctgatggacggggaagtcttctttgtggaagacactgagccacgctaagaagccgccaggcttctcagagacggggcagacacagcaagagggaggtcagagcagaggccagagcacaggcaggatacggggggaccatgccaccaccaccggcatccggggaggactgtcaaacgggtgactcggccaggaaggccagcctttgagagacagacatgcttgccgccccatccccttgccggcttccttctccgtccctgcgtcgagctgtggctacatttctcgatgagggcagagggcgacaggcgtgacaaccaccttcttgaagctctgcgggcaccctcctgcgggtggacaatgagcgcctgggaggccgttgtccttggttggggagcgctcgtctggatccagcctagcaaagaggctgctccggatggggaggggatgaaaaccctacgggtccgacacccatgcccacgttgcccaggccttcacagacccccaaactggaactgccgggacgacgactgccaaccggccacacgacccaggcagagacgcggggagacgctgaccagaagaaaggccgacgtgcaagaaatccaccctccggcgcacagggcccatgtgtcccaaggcgcacgcacacacagacggagagagacagaaagagagggcgaccgaaagagcgagaagggagagagacagagagagagagagagagagagagagagagagagagagacagaagtcggcacacagacacgcactgcgcgcgcacacacacagacacacacacagacgcatccccccaacacacacacacacacccataacgaacacacacgtacagcagggaacacccacccgcaggcagcccctgaagctgccgggttctgctctccgcgactaagagccaccggtgagagagcagcccacgggcacacaggcggacctgtgctcgtcatcacaagggctccacttttggggagactcacccgcacaccgtccgcgcacgcctgaggctgggatcccgcgctgcctcgccggcgatctgtctgaggtttcttcctcttggggtttcttcctgctggtggaccctccgcgaatcccggcctccggagaccgtcctggtaactgccctggccaggactggtctcagcccagactcagacgcacgatcacacagggctcctacttcgccaagtgtcagggacccatcccctggcaacggtggctttcactgtgacccaagcggcggcttgggcctcgcgcatgcgcactggcgaggccgactcccccgctccacccccccttactccacagagtcaggctgcggaccctttaaaaaatggcggcgacgcggcggctgcggggcctggggcggcggtgctggaggttgcggcggcggcggtggcggcgcagcccgaggcggcgggtgggaagaggactgccagaggggcctgcgggagacccagggtcggacccataggagtcctgtggtgaggacctccttgatcgctcttctgcttcggttcccgcgaaaggaggagcttcgggatgccggctgggctgcgcggactcctcttggggtccgatgatggatccaaccgggtgatcgggaatggggttccaatgcagtgaggccgaaagggtctcgccggggcacagaaagatccccagggccgcaaggcgtgctgtcggctgcaaaggcaccgacccatgagcccactgcctccctccctcctggcaggagcaggggcctgccttcatctccaaggcccgagggctccggcatcccgacgcggcttccggcgacacgggcaaagagagaggcgagtccgagctgcagccagcgtgtccacatgtggcactgtcgtcccccaagagcacatgcaggcagcgtgtgtctttgaggccgtagggggcgacgacgagacggacagtgatgtccaggcgtgcgcccggggggccactggagacctgccccacaaagcggaggaaaagccaagcgcacctgaaaacctgcgagacagggcctgtgcgcgagtccacgccacgttcagggaggcccgccagaggagccgagaggtttggacaaagtacaccccacccccagcccgccgccggctaggtacccctgacgcaacctcccctgcacccagccaaaacccagtcccgttggctccctgacatccgtggcagccaaaagattcggtgctagaaggcactttccccaggagcggaggaaccggttggccctcaagaatcagagaggaagtgcaggtgggatgcaacaccgcctttcctagaaggccaatgtcaggagcggtgggcttgcctccgcctcttcctggaccgagcgtgcagccatcacttgggccatggagaccgagagagcttccctgtcccacacaggtatggaagcccagagctccaggatcaccacagctgcccagtcatccagaaagaggtgtggagagggaaacaatcatgacgcggaccgccacgaggtttctccctgatggacggggaagtcttctttgtggaagacactgagccacgctaagaagccgccaggcttctcagagacggggcagacacagcaagagggaggtcagagcagaggccagagcccaggcaggatacgggggggccatgccaccaccaccggcatccggggaggagtgtcaaacgggtgactcggccaggaaggccagcctttgagagacagacatgcttgccccatccccttgccggcttccttctccgtccctgcgtcgagctgtggctacatttctcgatgagggcagagggcgacaggcgtgacaaccgccttcttgaagctctgcgggcaccctcctgcgggtggacaatgagcgcctgggaggccgttgtccttggttggggagcgctcgtctggatccagcctagcaaagaggctgctccggatggggaggggatgaaaacccctgcgggttcgacgccgatgcccacgttgcccaggccttcacagacccccaaactggaactgccgggacgacgactgccaaccggccacacgacccaggcagagacgcggggagaggctgaccagaagaaaggccgacgtgcaagaaacccaccctccggcgtacagggcacatgtgtcccaaggcgcacgcacacacagacggacagagatagaaagagagggcgacggaaacagcgagaagggagagagagagagagagagagagagagagacagagagagacgtgagagagagacagaagtcggcacacagacacgcactgcgcgcgcacacacacagacacacacacagacgcacccccccaacacacacacacacacccataacgaacacacacgtacagctgggaacacccacccgcaggcagcccctgaagctgccgggttctgctctccgagactaagagccaccggtgagagagcagcccacgggcacacaggcggacctgtgctcgtcatcacaagggctccacttttggggagactcacccgcacaccgtccgcgcacgcctgaggctgggatcccgcgctgcctcgccggcgatctgtctgaggtttcttcctcttggggtttcttcctgctggtggaccctccgcgaatcccggcctccggagaccgtcctggtaactgccctggccaggactggtctcagcccagactcagacgcacgatcacacagggctcctacttcgccaagtgtcagggacccatccccgggcaacggtggctttcactgtgacccaagcggcggcttgggcctcgtgcatgcgcactggcgaggccgactcccccgctccacccccccttactccgcagagtcaggctgcggaccctttaaaaaatggcggcgacgcggcggctgcggggcctggggcggcggtgctggaggttgcggcggcggcggtggcggcgcagcccgaggcggcgggtgggaagaggactgccagaggggcctgcgggagacccagggtcggacccataggagtcctgtggtgaggacctccttgatcgctcttctgcttcggttcccgcgaaaggaggagcttcgggatgccggctgggctgcgcggactcctcttggggtccgatgatggatccaaccgggtgatcgggaatggggttccaatgcagtgaggccgaaagggtctcgccggggcacagaaagatccccagggccgcaaggcgtgctgtcggctgcaaaggcaccgacccatgagcccactgcctccctccctcctggcaggagcaggggcctgccttcatctccaaggcccgagggctccggcatcccgacgcggcttccggcgacacgggcaaagagagacagaggcgagtccgagctggtgccagcgtgtccacatgtggcactgtcgtcccccaagagcacatgcaggcagcgtgtgtctttgaggccgtagggggcaacgacgagacggacagtgatgtccaggcgtgcgcccggggggccactggagacctgccccacaaagcggaggaaaagccaagcgcacctgaaaacctgcgagacagggcctgtgcgcgagtccacgccacgttcagggaggcccgccagaggagccgagaggtttggacaaagtacaccccaccctcagcccgccgccggctaggtacccctgacgcaaactcccctgcacccagccaaaacccagtcccgttggctccctgacatccgtggcagccaaaagattcggtgctagaaggcactttccccaggagcggaggaaccggttggccctcaagaatcagagaggaagtgcaggtgggatgcaacaccgcctttcctagaaggccaatgtcaggagcggtgggcttgcctccgcctcttcctggaccgagcgtgcagccatcacttgggccatggagaccgagagagcttccctgtcccacacaggtatggaagcccagagctccaggatcaccacagctgcccagtcatccagaaagaggtgtggagagggaaacaatcatgacgcggaccgccacgaggtttctccctgatggacggggaagtcttctttgtggaagacactgagccacgctaagaagccgccaggcttctcagagacggggcagacacagcaagagggaggtcagagcagaggccagagcccaggcaggatacgggggggccatgccaccaccaccggcatccggggaggactgtcaaacgggtgactcggccaggaaggccagcctttgagagacagacatgcttgccccatccccttgccggcttccttctccgtccctgcgtcgagctgtggctacatttctcgatgagggcagagggcgacaggcgtgacaaccaccttcttgaagctctgcgggcaccctcctgcgggtggacaatgagcgcctgtgaggccgttgtccttggttggggagcgctcgtctggatccagcctagcaaagaggctgctccggatgtggaggggatgaaaacccctgcgggttcgacgccgatgcccacgttgcccaggccttcacagacccccaaactggaactgccgggacgacgactgccaaccggccacacgacccaggcagagacgcggggacacgctgaccagaagaaaggccgacgtgcaagaaacccaccctccggcgcacagggcacatgtgtcccaaggcgcacgcacacacagacggacagagacagacagagagggcgacggaaacagcgagaagggagagagagagagagagagagagagacagagagagacgtgagagagacacagaagtcggcacacagacacgcactgcgcgcgcacacacacagacacacacacagacgcacccccccaacacacacacacacacccataacgaacacacacgtacagcagggaacacccacccgcaggcagcccctgaagctgccgggttctgctctccgagactaagagccaccggtgagagagcagcccacgggcacacaggcggacctgtgctcgtcatcacaagggctccacttttggggagactcacccgcacaccgtccgcgcacgcctgaggctgggatgccgcgctgcctcgccggcgatctgtctgagttttcttcctcctggggtttcttcctgctggtggaccctccgcgaatcccggcctccggagaccgtcctggtaaatgccctggccaggactggtctcagcccagactcagacgcacgatcacacagggctcctacttcgccaagtgtcagggacccatccccgggcaacggtggctttcactgtgacccaagcggcggcttgggcctcgcgcatgcgcactggcgaggccgactcccccgctccacccccccttactccgcagagtcaggctgcggaccctttaaaaaatggcggcgacgcggcggctgcggggcctggggcggcggtgctggaggttgccgtggcggcggtggcggcgcagcccgaggcggcgggtgggaagaggactgccagaggggcctgcgggagacccagggtcggacccataggagtcctgtggtgaggacctccttgagcgctcttctgcttcggttcccgctgaaggaggagcttcgggatgccggctgggctgcgcggactcctcttggggtccgatgatggatccaaccgggtgatcgggaatggggttccaatgcagtgaggccgaaagggtctcgccggggcacagaaagatccccagggccgcaaggcgtgctgtcggctgcaaaggcaccgacccatgagcccactgcctccctccctcctggcaggagcaggggcctgccttcatctccaaggcccgagggctccggcatcccgacgcggcttccggcgacacgggcaaagagagacagaggcgagtccgagctggagccagcgtgtccacatgtggcactgtcgtcccccaagagcacatgcaggcagcgtgtgtctttgaggccgtagggggcgacgacgagacggacagtgatgtccaggcgtgcgcccggggggccactggagacctgccccacaaagcggaggaaaagccaagcgcacctgaaaacctgcgagacagggcctgtgcgcgagtccacgccacgttcagggaggcccgccagaggagccgagaggtttggacaaagtacaccccacccccagcccgccgccggctaggtacccctgacgcaacctcccctgcacccagccaaaacccagtcccgttggctccctgacatccgtggcagccaaaagattcggtgctagaaggcactttccccaggagcggaggaaccggttggccctcaagaatcagagaggaagtgcaggtgggatgcaacaccgcctttcctagaaggccaatgtcaggagcggtgggcttgcctccgcctcttcctggaccgagcgtgcagccatcacttgggccatggagaccgagagagcttccctgtcccacacaggtatggaagcccagagctccaggatcaccacagctgcccaatcatccagaaagaggtgtggagagggaaacaatcatgacgcggaccgccacgaggtttctccctgatggacggggaagtcttctttgtggaagacactgagccacgctaagaagctgccaggcttctcagagacggggcagacacagcaagagggaggtcagagcagaggccagagcccaggcaggatacgggggggccatgccaccaccaccggcatccggggaggagtgtcaaacgggtgactcggccaggaaggccagcctttgagagacagacatgcttgccccatccccttgccggcttccttctccgtccctgcgtcgagctgtggctacatttctcgatgagggcagagggcgacaggcgtgacaaccaccttcttgaagctctgcgggcaccctcctgcgggtggacaatgagcgcctgggaggccgttgtccttggttggggagcgctcgtctggatccagcctagcaaagaggctgctccggatggggaggggatgaaaacccctgcgggttcgacgccgatgcccacgttgcccaggccttcacagacccccaaactggaactgccgggacgacgactgccaaccggccacacgacccaggcagagacgcggggacacgctgaccagaagaaaggccgacgtgcaagaaacccaccctccggcgcacagggcacatgtgtcccaaggcgcacgcacacacagacggacagagacagacagagagggcgacggaaacagcgagaagggagagagagagagagagagacagagagacagagagagacgtgagagagagacagaagtcggcacacagacacgcactgcgcgcgcacacacacagacacacacacagacgcacccccccaacacacacacacacacccataacgaacacacacgtacagcagggaacacccacccgcaggcagcccctgaagctgccgggttctgctctccgagactaagagccaccggtgagagagcagcccacgggcacacaggcggacctgtgctcgtcatcacaagggctccacttttggggagactcacccgcacaccgtccgcgcacgcctgaggctgggatcccgcgctgcctcgccggcgatctgtctgaggtttcttcctcttggggtttcttcctgctggtggaccctccgcgaatcccggcctccggagaccgtcctggtaactgccctggccaggactggtctcagcccagactcagacgcacgatcacacagggctcctacttcgccaagtgtcagggacccatccccgggcaacggtggctttcactgtgacccaagcggcggcttgggcctcgcgcatgcgcactggcgaggccgactcccccgctccacccccccttactccgcagagtcaggctgcggaccctttaaaaaatggcggcgacgcggcggctgcggggcctggggcggcggtgctggaggttgcggcggcggcggtggcggcgcagcccgaggcggcgggtgggaagaggactgccagaggggcctgcgggagacccagggtcggacccataggagtcctgtggtgaggacctccttgatcgctcttctgcttcggttcccgcgaaaggaggagcttcgggatgccggctgggctgcgcggactcctcttggggtccgatgatggatccaaccgggtgatcgggaatggggttccaatgcagtgaggccgaaagggtctcgccggggcacagaaagatccccagggcgcaaggcgtgctgtcggctgcaaaggcaccgacccatgagcccactgcctccctccctcctggcaggagcaggggcctgccttcatctccaaggcccgagggctccagcatcccgacgcggcttccggcgacacgggcaaagagagacagaggcgagtccgagctggtgccagcgtgtccacatgtggcactgtcgtcccccaagagcacatgcaggcagcgtgtgtctttgaggccgtagggggcgacgacgagacggacagtgatgtccaggcgtgcgcccggggggccactggagacctgccccacaaagcggaggaaaagccaagcgcacctgaaaacctgcgagacagggcctgtgcgcgagtccacgccacgttcagggaggcccgccagaggagccgagaggtttggacaaagtacaccccacccccagcccgccgccggctaggtacccctgacgcaacctcccctgcacccagccaaaacccagtcccgttggctccctgacatccgtggcagccaaaagattcggtgctagaaggcactttccccaggagcggaggaaccggttggccctcaagaatcagagaggaagtgcaggtgggatgcaacaccgcctttcctagaaggccaatgtcaggagcggtgggcttgcctccgcctcttcctggaccgagcgtgcagccatcacttgggccatggagaccgagagagcttccctgtcccacacaggtatggaagcccagagctccaagatcaccacagctgcccaatcatccagaaagaggtgtggagagggaaacaatcatgacgcggaccgccacgaggtttctccctgatggacggggaagtcttctttgtggaagacactgagccacactaagaagccgccaggcttctcagagacggggcagacacagcaagagggaggtcagagcagacgccagagcacaggcaggatacggggggaccatgccaccaccaccggcatccggggaggagtgtcaaacgggtgactcggccaggaaggccagcctttgagagacagacatgcttgccgccccatccccttgccggcttccttctccgtccctgcgtctagctgtggctacatttctcgatgagggcagagggcgacaggcgtgacaaccaccttcttgaagctctgcgggcaccctcctgcgggtggacaatgagcgcctgggaggccgttgtccttggttggggagcgctcgtctggatccagcctagcaaagaggctgctccggatggggaggggatgaaaaccctgcgggtccgacgcccatgcccacgttgcccaggccttcacagacccccaaactggaaccgccgggacgacgactgccaaccggccacacgacccaggcagagacgcggggacacgctgaccagaagaaaggccgacgtgcaagaaacccaccctccggcgcacagggcccatgtgtcccaaggcgcacgcacacacagacggacagagacagaaagagagggcgaccgaaagagcgagaagggagagagacagagagagagagagagagagagagacgtgagagagagacagaagtcggcacacagacacgcactgcgcgcgcacacacacagacacacacacagacgcatccccccaacacacacacacacacacccataacgaacacacacgtacagcagggaacacccacccgcaggcagcccctgaaggtgccgggttctgctctccgcgactaagagccaccggtgagagagcagcccacgggcacacaggcggacctgtgctcgtcatcacaagggctccacttttggggagactcacccgcacaccgtccgcgcacgcctgaggctgggatgccgcgctgcctcgccggcgatctgtctgagttttcttcctcctggggtttcttcctgctggtggaccctccgcgaatcccggcctccggagaccgtcctggtaaatgccctggccaggactggtctcagcccagactcagacgcacgatcacacagggctcctacttcgccaagtgtcagggacccatccccgggcaacggtggctttcactgtgacccaagcggcggcttgggcctcgcgcatgcgcactggcgaggccgactcccccgctccacccccccttactccgcagagtcaggctgcggaccctttaaaaaatggcggcgacgcggcggctgcggggcctggggcggcggtgctggaggttgcggtggcggcggtggcggcgcagcccgaggcggcgggtgggaagaggactgccagaggggcctgcgggagacccagggtcggacccataggagtcctgtggtgaggacctccttgatcgctcttctgcttcggttcccgctgaaggaggagcttcgggatgccggctgggctgcgcggactcctcttggggtccgatgatggatccaaccgggtgatcgggaatggggttccaatgcagtgaggccgaaagggtctcgccggggcacagaaagatccccagggccgcaaggcgtgctgtcggctgcaaaggcaccgacccatgagcccactgcctccctccctcctggcaggagcaggggcctgccttcatctccaaggcccgagggctccggcatcccgacgcggcttccggcgacacgggcaaagagagacagaggcgagtccgagctggagccagcgtgtccacatgtggcactgtcgtcccccaagagcacatgcaggcagcgtgtgtctttgaggccgtagggggcgacgacgagacggacagtgatgtccaggcgtgcgcccggggggccactggagacctgccccacaaagcggaggaaaagccaagcgcacctgaaaacctgcgagacagggcctgtgcgcgagtccacgccacgttcagggaggcccgccagaggagccgagaggtttggacaaagtacaccccacccccagcccgccgccggctaggtacccctgacgcaacctcccctgcacccagccaaaacccagtcccgttggctccctgacatccgtggcagccaaaagattcggtgctagaaggcactttccccaggagcggaggaaccggttggccctcaagaatcagagaggaagtgcaggtgggatgcaacaccgcctttcctagaaggccaatgtcaggagcggtgggcttgcctccgcctcttcctggaccgagcgtgcagccatcacttgggccatggagaccgagagagcttccctgtcccacacaggtatggaagcccagagctccaggatcaccacagctgcccaatcatccagaaagaggtgtggagagggaaacaatcatgacgcggaccgccacgaggtttctccctgatggacggggaagtcttgtttgtggaagacactgagccacgctaagaagccgccaggcttctcagagacggggcagacacagcaagagggaggtcagagcagaggccagagcccaggcaggatacgggggggccatgccaccaccaccggcatccggggaggagtgtcaaacgggtgactcggccaggaaggccagcctttgagagacagacatgcttgccccatccccttgccggcttccttctccgtccctgcgtcgagctgtggctacatttctcgatgagggcagagggcgacaggcgtgacaaccaccttcttgaagctctgcgggcaccctcctgcgggtggacaatgagcgcctgggaggccgttgtccttggttggggagcgctcgtctggatccagcctagcaaagaggctgctccggatggggaggggatgaaaacccctgcgggttcgacgccgatgcccacgttgcccaggccttcacagacccccaaactggaactgccgggacgacgactgccaaccggccacacgacccaggcagagacgcggggacacgctgaccagaagaaaggccgacgtgcaagaaacccaccctccggcgcacagggcacatgtgtcccaaggcgcacgcacacacagacggacagagacagacagagagggcgacggaaacagcgagaagggagagagagagagagagagacagagagacagagagagacgtgagagagagacagaagtcggcacacagacacgcactgcgcgcgcacacacacagacacacacacagacgcacccccccaacacacacacacacacccataacgaacacacacgtacagcagggaacacccacccgcaggcagcccctgaagctgccgggttctgctctccgagactaagagccaccggtgagagagcagcccacgggcacacaggcggacctgtgctcgtcatcacaagggctccacttttggggagactcacccgcacaccgtccgcgcacgcctgaggctgggatcccgcgctgcctcgccggcgatctgtctgaggtttcttcctcttggggtttcttcctgctggtggaccctccgcgaatcccggcctccggagaccgtcctggtaactgccctggccaggactggtctcagcccagactcagacgcacgatcacacagggctcctacttcgccaagtgtcagggacccatccccgggcaacggtggctttcactgtgacccaagcggcggcttgggcctcgcgcatgcgcactggcgaggccgactcccccgctccacccccccttactccgcagagtcaggctgcggaccctttaaaaaatggcggcgacgcggcggctgcggggcctggggcggcggtgctggaggttgcggcggcggcggtggcggcgcagcccgaggcggcgggtgggaagaggactgccagaggggcctgcgggagacccagggtcggacccataggagtcctgtggtgaggacctccttgatcgctcttctgcttcggttcccgcgaaaggaggagcttcgggatgccggctgggctgcgcggactcctcttggggtccgatgatggatccaaccgggtgatcgggaatggggttccaatgcagtgaggccgaaagggtctcgccggggcacagaaagatccccagggcgcaaggcgtgctgtcggctgcaaaggcaccgacccatgagcccactgcctccctccctcctggcaggagcaggggcctgccttcatctccaaggcccgagggctccagcatcccgacgcggcttccggcgacacgggcaaagagagacagaggcgagtccgagctggtgccagcgtgtccacatgtggcactgtcgtcccccaagagcacatgcaggcagcgtgtgtctttgaggccgtagggggcgacgacgagacggacagtgatgtccaggcgtgcgcccggggggccactggagacctgccccacaaagcggaggaaaagccaagcgcacctgaaaacctgcgagacagggcctgtgcgcgagtccacgccacgttcagggaggcccgccagaggagccgagaggtttggacaaagtacaccccacccccagcccgccgccggctaggtacccctgacgcaacctcccctgcacccagccaaaacccagtcccgttggctccctgacatccgtggcagccaaaagattcggtgctagaaggcactttccccaggagcggaggaaccggttggccctcaagaatcagagaggaagtgcaggtgggatgcaacaccgcctttcctagaaggccaatgtcaggagcggtgggcttgcctccgcctcttcctggaccgagcgtgcagccatcacttgggccatggagaccgagagagcttccctgtcccacacaggtatggaagcccagagctccaggatcaccacagctgcccagtcatccagaaagaggtgtggagagggaaacaatcatgacgcggaccgccacgaggtttctccctgatggacggggaagtcttctttgtggaagacactgagccacgctaagaagccgccaggcttctcagagacggggcagacacagcaagagggaggtcagagcagaggccagagcccaggcaggatacgggggggccatgccaccaccaccggcatccggggaggagtgtcaaacgggtgactcggccaggaaggccagcctttgagagacagacatgcttgccccatccccttgccggcttccttctccgtccctgcgtcgagctgtggctacatttctcgatgagggcagagggcgacaggcgtgacaaccgccttcttgaagctctgcgggcaccctcctgcgggtggacaatgagcgcctgggaggccgttgtccttggttggggagcgctcgtctggatccagcctagcaaagaggctgctccggatggggaggggatgaaaacccctgcgggttcgacgccgatgcccacgttgcccaggccttcacagacccccaaactggaactgccgggacgacgactgccaaccggccacacgacccaggcagagacgcggggagaggctgaccagaagaaaggccgacgtgcaagaaacccaccctccggcgtacagggcacatgtgtcccaaggcgcacgcacacacagacggacagagatagaaagagagggcgacggaaacagcgagaagggagagagagagagagagagagagagagagacagagagagacgtgagagagagacagaagtcggcacacagacacgcactgcgcgcgcacacacacagacacacacacagacgcacccccccaacacacacacacacacccataacgaacacacacgtacagctgggaacacccacccgcaggcagcccctgaagctgccgggttctgctctccgagactaagagccaccggtgagagagcagcccacgggcacacaggcggacctgtgctcgtcatcacaagggctccacttttggggagactcacccgcacaccgtccgcgcacgcctgaggctgggatcccgcgctgcctcgccggcgatctgtctgaggtttcttcctcttggggtttcttcctgctggtggaccctccgcgaatcccggcctccggagaccgtcctggtaactgccctggccaggactggtctcagcccagactcagacgcacgatcacacagggctcctacttcgccaagtgtcagggacccatccccgggcaacggtggctttcactgtgacccaagcggcggcttgggcctcgtgcatgcgcactggcgaggccgactcccccgctccacccccccttactccgcagagtcaggctgcggaccctttaaaaaatggcggcgacgcggcggctgcggggcctggggcggcggtgctggaggttgcggcggcggcggtggcggcgcagcccgaggcggcgggtgggaagaggactgccagaggggcctgcgggagacccagggtcggacccataggagtcctgtggtgaggacctccttgatcgctcttctgcttcggttcccgcgaaaggaggagcttcgggatgccggctgggctgcgcggactcctcttggggtccgatgatggatccaaccgggtgatcgggaatggggttccaatgcagtgaggccgaaagggtctcgccggggcacagaaagatccccagggccgcaaggcgtgctgtcggctgcaaaggcaccgacccatgagcccactgcctccctccctcctggcaggagcaggggcctgccttcatctccaaggcccgagggctccggcatcccgacgcggcttccggcgacacgggcaaagagagacagaggcgagtccgagctggagccagcgtgtccacatgtggcactgtcgtcccccaagagcacatgcaggcagcgtgtgtctttgaggccgtagggggcgacgacgagacggacagtgatgtccaggcgtgcgcccggggggccactggagacctgccccacaaagcggaggaaaagccaagcgcacctgaaaacctgcgagacagggcctgtgcgcgagtccacgccacgttcagggaggcccgccagaggagccgagacgtttggacaaagtacaccccacccccagcccgccgccggctaggtacccctgacgcaacctcccctgcacccagccaaaacccagtcccgttggctccctgacatccgtggcagccaaaagattcggtgctagaaggcactttccccaggagcggaggaaccggttggccctcaagaatcagagaggaagtgcaggtgggatgcaacaccgcctttcctagaaggccaatgtcaggagcggtgggcttgcctccgcctcttcctggaccgagcgtgcagccatcacttgggccatggagaccgagagagcttccctgtcccacacaggtatggaagcccagagctccaggatcaccacagctgcccaatcatccagaaagaggtgtggagagggaaacaatcatgacgcggaccgccacgaggtttctccctgatggacggggaagtcttgtttgtggaagacactgagccacgctaagaagccgccaggcttctcagagacggggcagacacagcaagagggaggtcagagcagaggccagagcccaggcaggatacgggggggccatgccaccaccaccggcatccggggaggagtgtcaaacgggtgactcggccaggaaggccagcctttgagagacagacatgcttgccccatccccttgccggcttccttctccgtccctgcgtcgagctgtggctacatttctcgatgagggcagagggcgacaggcgtgacaaccaccttcttgaagctctgcgggcaccctcctgcgggtggacaatgagcgcctgggaggccgttgtccttggttggggagcgctcgtctggatccagcctagcaaagaggctgctccggatggggaggggatgaaaacccctgcgggttcgacgccgatgcccacgttgcccaggccttcacagacccccaaactggaactgccgggacgacgactgccaaccggccacacgacccaggcagagacgcggggacacgctgaccagaagaaaggccgacgtgcaagaaacccaccctccggcgcacagggcacatgtgtcccaaggcgcacgcacacacagacggacagagacagacagagagggcgacggaaacagcgagaagggagagagagagagagagagagagagagagagagagagagagagagagagaggtgagagagagtcagaagtcggcacacagacacgcactgcgcgcgcacacacacagacacacacacagacgcacccccccaacacacacacacacacccataacgaacacacacgtacagcagggaacacccacccgcaggcagcccctgaagctgccgggttctgctctccgcgactaagagccaccggtgagagagcagcccacgggcacacaggcggacctgtgctcgtcatcacaagggctccacttttggggagactcacccgcacaccgtccgcgcacgcctgaggctgggatgccgcgctgcctcgccggcgatctgtctgagttttcttcctcctggcgtttcttcctgctggtggaccctccgcgaatcccggcctccggaaaccgtcctggtaactgccctgaccaggactggtctcagcccagactcagacgcacgatcacacagggctcctacttcgccaagtgtcagggacccatccccgggcaacggtggctttcactgtgacccaagcggcggcttgggcctcgcgcatgcgcactggcgaggccgactcccccgctccacccccccttactccgcagagtcaggctgcggaccctttaaaaaatggcggcgacgcggcggctgcggggcctggggcggcggtgctggaggttgcggcggcggcggtggcggcgcagcccgaggcggcgggtgggaagaggactgccagaggggcctgcggcagacccagggtcggactcataggagtcctgtggtgaggacctccttgatcgctcttctgcttcggttcccgctgaaggaggagcttcgggatgccggctgggctgcgcggactcctcttggggtccgatgatggatccaaccgggtgatcgggaatggggttccaatgcagtgaggccgaaagggtctcgccggggcacagaaagatccccagggccgcaaggcgtgctgtcggctgcaaaggcaccgacccatgagcccactgcctccctccctcctggcaggagcaggggcctgccttcatctccaaggcccgagggctccggcatcccgacgcggcttccggcgacacgggcaaagagagacagaggcgagtccgagctggtgccagtgtgtccacatgtggcactgtcgtcccccaagagcacatgcaggccgcgtgtgtctttgaggccgtagggggcgacgacgagacggacagtgatgtccaggcgtgcgcccggggggccactggagacctgccccacaaagcggaggaaaagccaagcgcacctgaaaacctgcgagacagggcctgtgcgcgagtccacgccacgttcagggaggcccgccagaggagccgagacgtttggacaaagtacaccccacccccagcccgccgccggctaggtacccctgacgcaacctcccctgcacccagccaaaacccagtcccgttggctccctgacatccgtggcagccaaaagattcggtgctagaaggcactttccccaggagcggaggaaccggttggccctcaagaatcagagaggaagtgcaggtgggatgcaacaccgcctttcctagaaggccaatgtcaggagcggtgggcttgcctccgcctcttcctggaccgagcgtgcagccatcacttgggccatggagaccgagagagcttccctgtcccacacaggtatggaagcccagagctccaagatcaccacagctgcccaatcatccagaaagaggtgtggagagggaaacaatcatgacgcggaccgccacgaggtttctccctgatggacggggaagtcttctttgtggaagacactgagccacactaagaagccgccaggcttctcagagacggggcagacacagcaagagggaggtcagagcagaggccagagcacaggcaggatacggggggaccatgccaccaccaccggcatccggggaggactgtcaaacgggtgactcggccaggaaggccagcctttgagagacagacatgcttgccgccccatccccttgccggcttccttctccgtccctgcgtcgagctgtggctacatttctcgatgagggcagagggcgacaggcgtgacaaccaccttcttgaagctctgcgggcaccctcctgcgggtggacaatgagcgcctgggaggccgttgtccttggttggggagcgctcgtctggatccagcctagcaaagaggctgctccggatggggaggggatgaaaacccctgcgggtccgacgccgatggcgacgttgctcaggccttcacagacccccaaactggaaccgccgggacgacgactgccaactggccacacgacccaggcagagaggcagggagaagctgaccagaaaaagactgaccagaagaaaggctgacatgcaagaaacccagcatgcggcgtacagggcacatgtgtgccaagagtgacgcacagacagatggacaatgacagaaagagagagcgagggaaagagcgagaagggagagagacgtaagagagcgatagaagtgggcagacagacacgtaggcgcgcgcacacatacacacacacacacacacacgcccgtaaggcatagagacctacagcagttaacagccacctccaggcagcccctgaagctgccgggttctgctctccgtgactaccacccaccggtgagagagcagccccaagggcacacaggcagacctgtcctcgacatcacaagggcaccacttttggggagactcaccggcacaccgtccgcgcactcctgaggctggattcccgcgctgcctccccggcgatctgtctgagatttcttgctgctgttgttttttcctggtggtgtaccttccgcgaatcccgggctccggagaccgcggtgttaacttccctggccaggactggtctgaaccccgactctgacgcactatcccacagagctcctactttcccaggtctcagggacccatcccggggcaactgtggcggtccctgtgaccaaagcggcggctcggacctcgcgcatgcgcactggcgaggccgactcccccgccccccttgttactccggagactaaggtcgcggatcctttgcaaaatggcgccgacgctgctgctgctgggagtggggtgtcgacggccgcagcagtgttggaggtatcgtgtggggtgaggaatgggagaggttcctgtgggagacccagggtcggacccataggattcccgtgttcaagacctccttgatctgtcttctgcttcaattcccagtggcggagtagcttcagggcgccggctggcctctccggagtcctcttcggatctgattatggatccgacccggtgatcagtaatggcgttacgatgtagtgaggtgggaaaggtctcgctggggcacagaaagatcccatgggccccaagatgtggtgtctactgaaattacaccgaccagtgagtccactggctccctctttctttggtgaaaccgtggcctgctttaatctttaaggcccagggggtccggaatccctacactgctttgcttgacatgtgcagagagagacagaggcgagtccgagggggagccagtgggaccacaggtggcactggtatcccccaagagcagatggagtgagcttgtgtctccgaggccgtatggagagatgctgagacggacagtggtgtcccgggatgcgcccgcggaccactggagacctcctgcacaaagctgaggaaaagcctagcacaccggaaaacctgcgagacagggcctgtgcccgagtccaagccacattcagggacgcctgccagaggagccgagaggtttcgacaaaatacacctcaccttcacgccgccactgggtaggtaccactgatgctgcctctcctgcacccagcaaaaccctgtcccttttgcttcctgacatccgtggcagccagaagattcagtgcctcaaggcactttccccaggagcagaggagccagatggccttgaagaatcagagaggaaaggcaggtgtgatacaacaccacatttcctagaaggtaataggccagccaccttcgcctcctgctcttcctataccagtcaggcagccatcacttgtgacatggataccaaaggagcttccttgtcccaggcaggtatggaagcccagagctccgggcttcctgcccaatcatccagaaataagtttggagagggaaacaatcatgaaacccatcctcacgaagtttctccctgatggactgagaagtcttctttgttgaagacattcagccaaagaagcctctaggcttctcagaaacagggcagacagagcaagagggaggacagagcagaggccagagcccaggctccatacagcacaatgccaccaccttgggcatgtgtggaggagtgccaaaccggtgatttggccaagaagaccagtattcgagtgcagagatgcttgctacatctcctacctggcgttcttttctttccttgtttccagcagtgtctagatatctcaatgagggcatacggcgagaggagtgagacccatcttctttgaggtcggtgggcacctctcatgcaggtggatattgagcttctgtgagaattttgtcctttgctggagtgtggtcgtcttgatactagcaatgagcccgctcacgatggggagccgatttaatcccctgcgggtccgacgcaactccccacgttgtccaggccgtcacgaacccaaactggaaccaccgggaaaacgaatgataaccggccagatgacccaggcagagacgcggggagaggctcaccagaagaaaggccgtacaagaaactgcccttcagcgcatatgcatccaaacacacacgcacacgagcacacacagacggaaacaggtagagattgatagagaaaggagacagagagaaacaagagaaagaaagagacagaacccagacatactgcagtggcacagtaacattcatccccaggcagcccctgaagcctcagggttctgctttccgcgacaacgaccctggggtgagagagcagcccttgggcatacaagcagacctgtcctcgagatcgcaaaggcacgacttttggggaaactcactggcacaccgttcgcgcaggcctgagcctggaatcctgcggtgcttcccaggcgctcctcctgaggtttcttcctcctggtcgaccctccgcgaatcctggcctccggataccatcctgtcgaccccgtggcgaggactggccttagcccggagttcgacgtgctgccacagaaggctcctccttcgcgaagcgttcaaggactcatctccaggcagcggtggcggtctctgtgacttgagcatccgctgatgattcgcgcatgcgctttggcaaggctgactgcgctctactctgggtcaggctgcagctcctgaaaaaaaattgctggggctgtgtgtgtgaatgggggtgtgcatgtatgtcttcggacgaacgtcccctgttcgctggagggcggtttcttgcacgtcgtcctttttggtgagcctctttctcggtctctgcctgggtcgtgtagccggtcgtgtgaccggaaccggcagtcattttcctggcggctgcacttttagtttctgaaggccttggcgaggtttggtgctgtgtcagacccgcaggcgttcaagtcacctgcccattctgagtggcagaaatcctaaaaatcctccacccaggagcagaggacccggatgtctctcaagaattagaaaggaagtgcagattattgcaaagcacatggtagctaacactggataaatgagatgaacattggtttgctaattacccatatttacgccccagggaaggagggcccagcacaccatatgggataccgtgttgcacttaggaacagagtaatcaggtggaggctataccaggaggctttgtagtagcaagagtatgggaggtaacccctggttcttgaaggagggtgtgattggcctgtttgaataattctgcaggctggctggaacctgacgcccgctactatgcagtaagcaggtaatgtgccggtcctctgagggaagtgattcggctagggcaccttattcaaaggagtacaacagggcaaggaatttgcagttaatccattcaggcctccttgttttccccccaatgtcagggcacatataatattgagccttaatcttaggtcttataccacacttgaccccttgatgtcttgacatctcttggcgatactgatacttctagagtgtagaactgttactggatggaaggtcttgactgtaagttgtccacgtttctggcttgttgaagaaagcattaaacaaactacacgaagcaacaaaagaacgaagccacgaaagaagaaagaagcaacgaaaccgcagatttatttaagcgaaagtccactctacagagccagagccggctagagcaagcggccgaagagcccagattacaatgttctttagagtttttattaagccaaagaatttgataacaccaataagtgccctttcgaggcctccaattggttacacactgtgaaggattggcccatggctgaactcagaggctgaactggagacttctgtgttgttatcacaggagtgaggatgtggcctgtgtgctgcttaacctggcctagaacttgctgcacctgctgttcttttgcttccaccttaacccttagtttatgctaattttctattctcctgcctcagaagtgcctccttaggaggccaagcaggctcttacctgcttcaggtgagcaggtaaccaggagggagcggaccacagttgctatcatgtctatgattagtgtttggaaacctgtgcagagcctttggctccacttggatgggatagccaagagaacagatatgtggtttttggatcatgatatgtctgaatatttgtgtaaccttatgtattaccatcagtttttatttgttaggcatggttattcttgctcgtattattattattattattattattattattattattattattttgatagagtctcactctgttgccaggctggagtgcaatgctgccatattggctcactgcaacctctgcctctcagattcaagcgattctcctgcctcagcctcccaagtagctgggaatacaggcacgtgccaccacacccagctaatttttgtatttttagtagagacggggtttcacggtgttggccaggatgatctcagtctcttgaccttgtgatccacccaacttggccttccaaagtgctgagattacaggcataagccatcatgcccagccaaaaatttttttaataaaataaaatatgtgagtattggccaggtgcagtggcttatgtctgtaatcccagcattttgggaggctgagataggaggatcacttgaggccaggagttcaagaccagcctggacaacacagcaagaccccacctctaaagaaaaaaagtgtgtgtgtgtgtgtgtgtgtgtgtgtgtgtaatatgacataaacaagtgtgggtatatcaatcattgttcaccagttactgatgctgtataacacaccactccaaacttagtagtataagacaaccattttactgtgctcactgattctgtgggttaggcatttagagagctcacagaagagatggtgtgcctctgctcctgatgtctctggcctcaaccaggaggattcaaaagctgggaataacctgatgcctgagggctgcaaacctatgaagcctgctttgcacacatgtctggcacatgcagtgggaggactcaaagactcagactagtagcctccccacatgacttggcttcctcatagcatggcagctcacagcacttggaacttcttacatgatagctcgagacttcaaacacaggagtttcagctaatgaggtgaaggccacagtgcctcttatgactcagccttgggagtcacacagcattggttacaaacaataaacaaatccagattcacgggcagaggagttagactccacccttaaagtgggaattgcaagattctagaacaacatatgagacaagcctattgttgcaaccatctttggagaatacaatctgcagcaatcacctttggagactaggaaaccaatgcagtattctgaaactcgtaattctgaaaactaatgaatatgaatggaaagaatcaagcatttatcctccctttcctacacatgctatccctctaagtaatcagatagttgatgtgtggggattttatttttataaaaggattcctgtaatggaaatttcagtaatggaaataaaaggattccagtaatggctgaaagagagacacaataagaaagtgatcattttgcagctcctaacaacaacgaatctaggcaatgatcatgaatgaatgcatgacattatgcaaaaggcaatcactttacaatggataaatcacattgatgacacttaagcccactaccaaatctaatcacaaaaacagtgacaagcagaccttgccaaaataattgaacttgaatttgaccaagcttctagagcagaatttctcaactctgacactatttacactttggaccagatgattctttgggattggagaaggctgtcctgtaaggtgtatgggatgtttagcagcatcctggcctctagccaataggtggcagcaataccatccttccttgcagttgtgacgaccaaaaatatctccaaacattgccgaatgtcttctagaggtaaaaataaaaacaaacaaacaaaaaacaaaaccacaactggttgagaaccactgctctagttaatgaccagatattttagagaaaatatacagcatctaatttgttaatcagtaccatgggggtgtactcaaaggcagtatgtgggaactctatatgatctagtgtttgatttctccaaaatataaatagcaagaaaaaagggaagtcaatagattaaaagacatataagagccggctgggcgcagtggctcaagcttttaatgccagcactttggaggccgcggcgggcagatcatctgaggtcaggaaaagttcttaaaagaactataagaaaaagagttttaagaaaagttcttaaaagaactatatttcatactgaaatatttatagatgaaatgtctagaattttctctaaaataattgagtgtaaatggagatgaagcaaaactggccatgtgttacttgttaaggctgggttcactgtactaggctctctgcacatataatgctggaagtatccataataaagagcttgaatttaaaaaaaaattacctccttccaagtactactcaaatcagcaagcactaatttggaaggacatccataaggtcttccctagaaacacaagctaaaaaaaaattacatataattctagtaaaggcaaaagggaacaaaagtcactcagtatatgtgtgtgtgcatgtctgagcaaggagagaggtaaaggaaacttaccagacttttaaaatggataaccttggggagttgagaatataaaataacaagaaatatacatatatttgtctctgcccctagctcctggtctagagctccttaaaacccttgggtactaggaggatcatctgttctaatatctggtctttgaccctagttcctgacagagttctcaaatcccttgggatttcctggctgataggaacatcttatgttctaatgaggggacttcttggtgggctcctggatggccaagggatgtgatatgagggttggaattttcagccccaccccttgacctccggggaggggacagcagcttaaggttgagttgactgacaatggccaatgatgtcatcaatcatgcctatgtaatgaagcctccatgaaaatccaaaaggactgggttcagagagcttccagattgctgaacacgtgggggttcctggaggatgatgtgctggggagagagcattgaagcccaatgccacttcccacatattttgccctaggtatttcttcatcgaaaacctttgtaatatcctttttattgcaaaaaaaggatgcaatatcctttttattactctgttacaccgggtcctcttttggactcctctggctggaaggaaagcgtttctctcataatttttgctccctgaacctatcacacagctctgagacttccttccttccaaagccagaagataaagggggaaaataccccagcaaacctgtggtcatcacgtccattcttcacgtttttaactcccttcacatctgcctgctattatttgtatttctgagtcttcaggtggtttctttttgtattcactctggggtgttaagtagaaatcggtgagagagatgctgaaatgtgcttatctcatcttggccagtaatagaagtctgccttgtatatgttattgtatgtatgtgtatatattaagttgtatatacacatattaaatatatatacatatgttatatttatatacccatacatttgtttcctcatgcaatttgtcccagcagaagtaaaaactcataaagatataagtaaaagaatatttacagaagcattatttttggtggcaaaagtactttaatatcctaaatgctcgtataatggaagataatttaactcttacaaagaatgagttagctctttatctactataaaggtatcctaatatctttatccctgaactgataactgtggcagagatcgcgccactgcactcaagcctgggtgacagagcgagactccctctaaaaaacaaacaaaaaaaatagtttgtgggaccaattccaatccagtccaggggagcacacactggcgaccaacatcccccatcaggccccttctgggtcgagagaatgcgcctggaacagactgggaaactccagcaggcaaagtaaggtgccaggaataaagacactgcctgacacattctccatgttccctacacctactcctctccccaccacgcttccatccagctccaattttgccctttccccagtagcctcagattgaaaccttgcaaggaagaagccgattctcaaagtcacaggcttaggaatccgagcaacaaagaaaaatgagcccctgctcccccaactcccccctactcccctcagcactgctgccctgcacctgccccctcctccataatttgaactgtcctcccagaagctggagagacggcccgcctgtcaggaaagaaaggaccagcatgcggcaaatgcctggggtatgtaggagcagacggcgagattagcgcagggatgtaagaaacaagaccaaagaagactccgcggcagacggcacactaggccttcataggggcgtgcgctggacaggacctcgccagttaccgaaagaattgtctgagaaaggctctgatctgacccgaaaggcccttggttcccacggcaacgcctcagcgtctggcagtaacaggctctgtgcccgggctctctggatctgcaggtcccgcctccgccagcctctcacagcccggaggcacctcccattggcgcctgacgggttggttagggcggcttttcttccggctgtgacaaatccagcctgaggagcgctcctgtgtctttcttagttgtttcttcccgcccacctgcccctcaaagccacaacccacttgcacaccaccgtgtggacacctaaaagcgaccgtctagatctgaaccgcgctgagggaatggtcagcttctctcccattagatggcttggcccaaaggacctagcgactgcccagacaaaaatttcttctgacatgctgcatgtgtctgtggtctctaagagtcaaaaccaaagccaaaagaaaaagacaaccccgccccccgcgaaacaacaacaacaacaacaacaacaacaacaaacaccaccaccaacccacctttcacgagaggagtccttgagaagagcctctccagccagaaccaggtaaaggaatctgtgcacttggcgggacccagaacacacagtggcagggacttgacagccacactcttaccccatagaatctccaccactgacacacagatcaggatgtgtcaccctgagagatgacaccacagttctgggctttcacagattgattccacactctctcactgattccacacacatcccattactcacaccagattccctcatcactgaccctacatacctacaatcattgattccatggacctcatcactatcccaaagaccacctatcactaatctacagaccctcccctgtcaccccagggacctcagatttcccatccccgattccaggatgtatagaacctcatctcttacccccacagacctattgataagagaatacactcatgggagactgtgttgaccattttacacatccattgtgtgtgtgtgtgtgtgtgtgtgttgattaatggacttaggtaaactttagcattttggtaggcaatgcagtttttcaatgccttttcattttctttctttttcttgtacatctttaaaggccttactccaggcagtgtgaattgcaatttattaatgcctatcccttattgagtccttgtcatacatatttgttattgatcataattcacaattcttataactcagagacaccaaagactcgcataaaaagaatggatgtgggtttttatttatttatttatttattttggtttctgtagattacaaaagtcattcatttatatcaagtcacgaagtgtatgctttgttttctaaaaaaaattctaattaaaaaaaattttttttagacatggtctccctctttcacccacgatggagtgccgtggtataatcatggccaccacagcctcgacctcttgggctcaagagatcctcccacgttaacctacctagtagctgagaccacaggcatgcaccaatacgcccacctaattattattattttttttatagatatgtgggtctcactatgttgcagagacaggtctcaaactcctgggctcaaatgatactcccaccttggcctcccaaagtgttgagattacaggtgtgagccactgcacccagctgataaaatcttaaaaagagtaaaatactttggcatctaatggaaaatttccactgagatgatgcatcagaaattaaggtagaataagatggtcctagggcatctgaaacaacggaaactcaatcttggactgggtatggtggctcatgcctgcaatctcagaactttgggaggaaaaggtgggggactcacttgaggtcagaagttcgagagcattctagccaacatggtgaaacactgtctctactaaaaatataaaaattagcctggaggttgcagcgagctgagatcgtgccactgcactccagtctgggcaacagagggagactctgtctcaaaaaaaaaaaaaaaaaagaagaagaagtagaataaacaaaatcttaatttattcatcaagtataaaaatgtggactagactctggaggaataatacataaaaagacataggcactatttttttttgaagttttattgagaaatattaataacatatcacagaagccacccattgaaagtgtaaaattcaacggttttcagtatatttgcacagttgtgcaaacagcaccacagtaagttttagatcattttcattaccttgaagtaaaccccatatccctccagttccccccaactcccctaaccccgggccaccactaatctactttctgtttctatgtattggtctattttggatattttatttaaatggaattacacaacatgtggtcttttgtgactggcttctttcacttagcatcatattttcaaggtttattaaatgttgcatgtgcagagggggcactttacataaggataaacctgggagtgggtgcgtactgattttgaaacttcactccaaaattgtaaaagggaaatgattgatttcaaatagaggaaaaacctgttcaagctaaaatcctccgttttcaccagtttgtaatgtggggttttattgcgaagaatggcaaggtttttatacatattttctgcaaattctccctgtgtttgggaacagtcacagaatgtggaggtatgggcttctggactctgtggctggagattcgagtccaggagaactcaagtctcagggtaggcagagaataacagtgcaagagtgccaatggaaccctttgaaatggaaaatttaaaatgttccctcccaaaggagtcccagataaccacacaaaagaggagtttgctgagtcagtccgtcgcgattctccaataggatgcagacagactgggaaagaagaaagtttatttctgcaaccgattacatggagaagggccaagtaactcaccagaccaactcaaagttacaagtttttttctagtgtttatagacatcttaaggtccacggtatgtgtgggactgcacctacaagcagaagtgttgcattcaatcaacatctaatctttaactagggcctagggtctggaaagatttctctagagtcttggaaagtttctgaatcttaagacaggctgaggtgaatgtgtaagaatgctattattattcgatcagactttaggatctgagaagaccaaggcagggtcttaatgggttcgttttcgcattccatccctgatactcaggcaccagtttctccatttcttcaacgtttaacttatgcattcatcaaaattatagtaaagggttagtggaaactgttctggttgctaatggaaacctggcctgccacactgtgatcggaactaaagcccactacagaacactgaaaatgcctgcaaaacactgactttactgacaagtcaattaaattacagaaaagcaagttcacctccctgcccgctctgtcctccggaattgctaggtagaaacgtgcacattgtcctaggttcagttttgcaaagacggagtccgtcagagaaagcatttgtttgatttcatgcatttgtgtttcctttgtccatttcctttatatttatttatttgtttatttatttttttgagacggagtttcgatcctctcgcccaggctggagtgcaatatcgcgatctcggctcactgcaacctccccctcccgggttcaaacgattctcctgcctcagcctcccaagtagctacgattacaggcatgtgccaccacgcccggctaatttttgtttttttagtagagacggagtttcaccatgttgcccaggatggtctcgaactccagagctcaggcaatccacccgcctcggcctcccaaagtgctgggattacaggcgtgagccactgcgcccggcctattttattttaagacggagtctcactcggtcgcccaggctggagcgcaggggcgcgatctcggctcactgcaacctccgcctcccgggttcaagcgattcttgtgcctctgactcctgagtagccgggattacaggcgcccgccaccacgcctggctaatttttgtatttttagtacagacggaggtttcgtcatgttggcggccggactggtctcgaactcctgacctcaagtaatccgcccgcctcggcctcccaaagtgctggaactacaggcgtgagccaccgcgcccggccccatttccttttattttattcttttcagacggagtttcggtcttgccgcccaggctggaggggagtggcgcgatctcggctcactgcaatctccacctcccgggttcaaacgattctcctgcatcagcctccggagtagatgggattacaggcgcacgccaccacgcccggctacatttcctttattttattttttataatttactaacctggttttttttttttttttttttttttgagacggagtctcgctctgtcgctcaggctggagtgcattggcgcgatctctgctcactgcaagctcctcctcccgggttcacgccattctcctgcctcagcctctccgagtagctgggactacaggcgcccgccaccacgcccggctaattttttgtattttcagtagagacggggtttcaccgtggtctcgatctcctgacctcgtgatccgcccgcatccgcctcccaaagtgttgggattacaagcttgagccaccgcgcctggcactagcctgttttttgataacaagactggcggtgcacaaagttgggtctctgtgttcaccgggaggtgggcattggccaggtgggacggtctccagcgcctggtgcaaatctccaccaaagtgcaggaaacagcatcaactattactgcaaagttttggtttggcgcagcgggtagacgttccagcgctgaaatgcgcaagaaagtttttgctgcgcatgtaggcgggtcaggcccaagcgcttcttattggctaatgtggagcgaacctgcacatccattgactgaaagctccgtctatttgaggctaaccgagagcgtcccttccttttgtgttgcctggaaacagactgtccgcctactaacatctgatcgcgtttcccattggtcgccgtttccggaagcccgccctcccgtttccggaagcccggcacaggctgggtctgcagatggcgtccgagtgcacagtggccagtgtgattccgcagtcttgggctgttcggccaagcgcccaccggacgtgggacgctggagggtcagcagcgtggagtcctggccttcagcgtccgcggctgggaaatcggccatcgccacggcgggaactaggactggctgcgtcccggcccttccccatccgtccaccggactcgtgggcgcccgcactgactgtgatgtagtttcctgacctctgacacgtattgtctcaagattaaaggtaaaaacgggactttttcagcccactcgggtaaaatgcccttttatttctaggcaggtgttttgttgcagaacgcctcgaagggagggagtgatcagtaggttgaagtttattaaataaaatacattactagtttatattatgtttataataaagcaccccaacctttaaaaaaaatctcactttttgccagttgtattatttagtggactgtctctgataaggacagccagttaaaatggcattttgttgttgttgctaatcaaaccaatttttagttttggtggttgtcctaacagcagcaacttctcaggctttatgaaatcatatttgttttctttttttttttttttgagacagagtctcgctctgtcgcccaggctggagtgcagtggcgtgatctcgagtcactgcaagctctgtctcctgggttcacgccattctcctgcctcagcctcccgagtagctgggactacaggcgcccgccaccacgtcccgctaattttttgtatttgtagtagagacggggtttcactgtgttagtcaggatggtctctatctcctgacctcgtgatcctcccgcctctgcctcccaaagtgcagggattacaggtgtgagccaccgcgcccagcttataaaatcatatttcttgtggaaaatttctgtgaaaggcacagcgagttagtttggaattgttttaaaggaagtaagttcctggttttgatatcttagtagtagtattttccccaatgtctttgaaatctaatttttggggcacgtatgtagagtaacttttgtgaaagaaacaaccagttaaggaggttttgggatttcctttatgaactataatgctggtttagatttttttttttttttgagacggagtttcgctcttgttgcccaggctggagtgcaatggtgtgatcttggctcactgcaacctccgcctcacgggttcaagctattctcctgcctcagcctcatgagtagctgggattataggcatgcaccatcatgcctggctaattttgtatttttagtagagattgggtttcttcatgttggtcaagctggtttcgaactcccgagcttgggtgatccgcccgcctgggcctcccaaagtgctgggattacaggtgtgctccactgcagccggcatatatatatatatatatatatataataaaaatggtaatgacactatctcctaaatcctttaaaatgttaattggtggatctctgacttttgtagtatttatttcatagtgtgaatgagacacctataggcggcaggtctctatcttcatgaagtgtgaagatttggtgctttataaaatagcccccacattgttcataggccttattcttgattctcagctcccctctgcttctgacattgttactaaaattaagctatgtttttgtggttatgtgagagctgtggaaatgtccagcattagccactaatgtttctccttgatatttctccatatcttaatactgaccctcaatccgttactcagatgggtgtccttttcctggatgtctggaaactaagaccggctatccctctgacctccctgctgaacaaccatttttttcctctctctcttctcttgtctacacttgagttggtaacctcagctctttcatgagcagccttgattcctttgactccctctaactcagagtttattttatttatttatgtttttttgagacggagtctcgctctgtcacccaggctggagtgtagtggtgtgatctcagctcactgcaagctccgcctcctggggtcacgccattctcctgcctcagcctctcccagtagctgggactacaggcacccgccaccacgcccagctaattttttgtattttcagtagagatggggtttcaccgtggtctcgatctcctgacttcgtaatccacccgcctcggcctcccaaagtgctgggattacaagtgtaaaccaccgcacccggccataactctgagtttattacctgcagttccatcagccaagtttagggcccatgagaagggcccatgaatgaaattttcacatacctctagccaaaatatagtgtttccttccatcttgaatacaggctgtagagcccttgggtatggggcattattagcagtcagaccacagcagtttttatgtcatctgacagcatctccaaatagccttcatggttgtcactgcttcccaatgacaattccaaataacagttcccagtgatgatgtgctacttgctattgttacttaatgtgttaaagtggctgttacagacactattactatgtcaggaattacaccaaaatttagtagctcaaaccatcattttattatgtttgtggattctcatgcttatagtcaggatttcagacatggcacaagggtagcccacttgtctctgttccgtgatgtctggcctcagcacagaagactcaacagctggggtctggaaccatctggaggcttgttccttcacatctgatacctggcttgggatgttggaagagggggctcagctgggactgagtccctacatgtagtgtttccatatggccttgacttccttacagcctggtgtggggaaaagaaagagggatcagactgttactgtgtttgtgtagaaagaagtagacataagagactccattttgttctgtactaagaaaaattattctgccttgagatgctgttaatctgtaaccctacccccaaccctgtgctcacagaaacgtactctgttggctcaaggtttaatggatttagggctatgcaggatgtgctttgttaaacaaatgcttgaaggcagcatgcttgttaaaagtcatcaccactccctaatctcaagtacccagagacacaaaacactgtgtaaggccgcagggatctctgcctaggaaagccaggtattgtccaaggtttctccccttgtgatggtctggaatatggccccgtgggaaggaaaagacctgacgttcccccagcccgacacctgtaaagggtccgtggtgaggaggattagtaaaagaggagggcctctgcacttcagataagaggaaggcatctgtctcctgctcgtccctgggcaatggaatgtctctgtgtaaaacccgattaactgctctttaatgcaccaagatttttatgtatgtgcacatcaaagcacagcacctttttcttaaccttgtttatgacacagagatattcacatgttttcctgctgaccctctccccactattaccctattgtcctgccacatccccctctctgagatggtagagataatgatcaataaatactgagggaactcagagaccagtgccagcatgggtcctctgtatgctgagcgccagtcccctgggcccacttttctttctctatactttgtctctgtgtctctttcttttctcagtttcccgtcccacccgacaagaaacaccctcaggtgtggaggggcaggccatccctttcacctggcagcctcagggtagtcagaattcttaggaggcacagggctccaggtcagatgctgagtgatcttttatgaggtagcacagcaaatccacccaggatcggggagagaggacatcgattctgcctctcaaagggaggagtggcaagaaatgttgagccattttttaaaactaccacagcaacatgcctattaatatgtcagaaaaaattaaagcatcctgatagctgcatttctaagtaattggtctcctttgaaattctgtgaattgtgtttttggtagtatatggcattattctgaggaggggtcaaagactctcccgtatgttagaacggtcctgcacagaacaggctaacccccacccacgtcccccagtgtttgaaatgcatagtgtttgctgtggtttattggtcagggcaggagtttctcatttaaattggcctgtaactttttttttggtctgatttccttctgtttgtgctgatattctcacctcaataggaatcaggagcttcttttgctgttcttctgttttggatgcattggaaggtaagtttccttgtgaaccatattttggactcattttgtaggctttgccaaatggcctttttacgctcccattttgcattttctttggatattctcatagattctcagggatattttcatattttactattcatgaatttagaagtgtgtttactttcctgagttttcattttcttctttttcttccgttgtatgtaatttacagagcaaatacccaccagagagaataccgtaagggatgtggaaagtgagtttctttgcgcttatccagtgattgattttcagtcaatgagcattcagtatatgcctgggactctggctttatttattagctttctgatgctgaacccatcagtgaactactctgtatatttgattcatcatgaaatggtgacacccagggtggctgatttccaggtttacatcagttgccccaggggaagtgcctggcccttgtctggttgttgctgctctaactttgccctgttaattgaagaaatgcagctgtaaacacttcctggggtgttgctggcatttactgtcctcacagtttacagggaagcccatattttcagcctcttcctctgctttctgccatttctaaaccatctcacccgatctggtgtaatcttcattgtgtgtgagtttgcacagatgtaatttgggcctacatgtgtccaaagcctaatgcccacctcccacctccacgaaaatctggagctcaggacccactaccctcccccacccactgcaagcttgaacatttgatggtggaaaccccgccctgagtttgtattatggtgggttctcttgggtcttgttctctgtgggtctgtcctgcgttatagtgtgtggagccggggggattttcactgtgttcctaaaggagggtcacaaggagttgttgggcaaacggtctgatatttcctttttttttttgaaacagagtctcactctgtttcccaggctggagttctgtggcaccgtgttggctcactgcaacctccgtctcctgggttcaagcaattctcttgcctcagcctccagagtagctgggattacaggtgcccaccaccacgcctggctaattttttaatatttttagtggagacggggtttcatcgtgttggccaggctggtctcgaactcctgacctcaggtgatccgcccgcctaggcctcccagagtgctgggattacaggtgggcacctggccaaggggctgatatttcttaagggctttccccaagaaggaagaagccaaacctactcaggcaaatcttgtttatttattcttctaggtccagatttggaacaagtctctctagagattgaacaggtaaggctcacctttcaatagttacaccaagaaaggcctagctgatgacttaagctatggttttgggctgcacgagagtggtcaggtggacagtagggaagtctacatgtaacccaaacggaaaagagaaaaggcccctgagaaatcaggggaaagtgccacagtgtctctttcttgatgatgtcactggcatgtgggttaccttcccactgtgtcccccaaaggacatgaggccacaaactgaagtgcccatgaacagaggagctgtggggacggtggtttgatcgctccgttcaaatgcacaccccggtgcatgtgcatctcttctgatgcagggccccagtgggtaagctctgtgcttctccacacagtggatcaggagtggaaacattctgtctgtttagcgcttgatggtttggtggtgacctcatgtcatggtgattagagccaatgatcctaacagtttaaaattgttgagcttgtgggtaggtatttgggagatagtatgtgtgttacctagtgtttgtcatctgcagtggttttgttactttttgcataaactgcggagaacgtttactaactgcagatgatagagaaatcaccagtcactctaaaatcctcccatttcttggtctagagctgcgcctggaacccgccgcagggaggagacctgaagaccagaggaaacacagcaagtaggccctttaaaccactcacctgtgttgtcttctaatttattctgttttattttgtttccatcattttaaggggttaaaatcatcttgttcagacctcagcatataaaatgacccatctgtagacctcaggctccaaccataccccaagagttgtctggtttttttaaaattactgccaggtttcaactgcagatatccctggaaggaatattccagattccctgagtagtttccaggttaaagtcttataggcttcttctgttttgaggaggagttcctgtcagagaaaaacctgattttggatttttagctttaatgcttgtgaaacgctataaaaaataatattctacccctaacattaaagtactgttagtgagaaattaaaattccttcaggaggattaaactgccatttcagttaccctaattccaaacgttttggttgttagaattttctttaatgttcatgaagaagtgttttatattttccatcaagattgaacctctctctcttttttttttttttagacagagtctcgctctgttgcccaggctggagtgtagtatggcgatctctgctcactgcaagctctgccttccgggttcacaccattctcccacctcagcccctggagtagttgggactacaggctcatgctaccacacctggttaattttgtttttgtgtttttagtagaaacggggtttcaccgtgttggccaggatggtctggatctcctgacctcgtgatctgcccacctcagcctctcaaagtgctgggattacaggcctgagccactgtgcccggctgttttttcatttctattatgatttgttctgtggaatgtcagtgacttagcggtatgtttttcacatttttataaagctgaatagttctgtatgtcagctcagcacccctagtgtcagccatgctactctcctgctgtgcatagatgggggcccgtccacacccgaatctcctgggttcccgctgtcagcacccgaaggtacccaccagatgtgtctgtcgcttccctccatccacctctattgtggttctcatgtttctgcctccctagagaccatttctctccagagcagtgctttccaatagaaatacaatgccagacacatacgtcattttagattttctagtagtcactttagaaaagttaaaaagaaacaggtgaaattaatgttttatttcacctaaaatgttagcattatccaaaatatcacttcaacatcttatcaaaataaaaattattaatgaaatcatttactttttttttttttgagacagggtcttgctttgttgcccaggctggaatgcagtggcaccagcatagctcactgcagtctcaaactcctgggctcaagagatcctcctacctcagccttccaggtagtttggactacaggcacacaccaccatgccatgctaattttttttttttaaaggctgggtctcactctgtcagccgggctggagtgcagtagcacaatcttgactcactgcagcctcgatatctggggccgaaatgatcctcccacctcagcctcccaagtagctgggaccacaaacatgtgccaccacgcctgaataatttttgtatttttttgttaagacagggtttcagcatgttgtccaggctggtcttgaactccagagctcaagtgatccacccaccttggcctcccaaagtgctgggattacacgcgtgagccactgcacttggcctgattttttttttctgaagagatgaggtcttgctatgttgcccagaccggtctcaaattcctggctcaagcagtcctcctgtcttggccttccaaagtgctgggattacagatgtgagccaccacactggcccattctttcttttatactgagtattcagaatttttttaaaatgtgttttccacttacagcatttctcaggttggactagccatctttcaagtgctcagcagccacatgtggcaagtgcctgccttattggacagcacagctctggagggtgattttatgtacatccccactgctctctctgcctcctttattcccatctaccccacacccctgcagtctgtgactatcgtgtccctcctctcttcctgtctcttgtaatcctttaatatggagaattatttccaattccttaacatcctgcctgatttttttctgtcttacattcaagggtcacagttttcctctcaccctcatttcagtcttttcccataacatgtgacgtgcctttttgtcttggttgggtatttatttgcaatacaagaatgattgttttctttgatacattagtgactcacatacttttcatgttttttgagtacctctttcttgaaagaatttcaaattctaaagttaaattagaaagctttttttttttttttttttttgagttgtagtctcgctctgtcgcccagactggagtgcagtggcgtgatctcatctcactacaaactctgccttccagattcaagtgattctcctgcctcagcctcccgagtacccgggattacagatgtgcaccaccatgcctggctaatttttgtctttttagtagagccagagttttgccattttggctagcctggtcttgaactcttgacctcaagtgatctgcccgcctcagcctcccaaagtgctgggattacaagggtgggccaccatgcacaacctagacagcttattttattttattattataattttttttttttcgagatgaagtcttgctctgtctcccaggctggagtacaatggcaggtctcggatccctgcaacctctgcctcctgggtccaagcagttctccctgcctcagcctctcgagtagctgggattacaggtgcccaccaccatgcccagctaatttttgtatttttagtagagacagagtttcaccatgttggccaggctggttttgaactcctgacctcaggtgatccgcccacctcggcctcccaaaatgctggtattacaggcatgagccattttccctggccaggaaacttatttcaaaaggtgtgtatagagccccttatgtttctacttgatttttaaatgacaggtctatatgttttaggatgtaatatctcactgtgtgttgctttgcatcattgaacatttttggtaattatttttattttctatatattttagagatttcattaaactaatacggaatttcatattcaggggcaggcatagtggctcatacctgttttcccagcactttgggaggccgaggcgggcagatcacctgaggtcaggggtttgagaccatcctggccaacatggcaaaaccccgtctctactaaaaatacaaaattattcgtgtagtggtgcaggcctgtaatcccagctacttgggaggctgaggcaggagaatcgcttgaacccggaggcagaggttgcagtgagccgtgatcttgccacttcactccagcctggcccacagagcaaaactcctcaaaaaaaaaaaaaaaaaatcatactcgctcgtatcaaaaatgaaaatttatttttacaaatttctatgtgagtgatagaattattttaatgtcagaaaggttcataagaaatgggtgtagtgattgtgttctttcctgtgctcgaatggaaaatgatgagggaacacaatgttagagttgcagtgagaaggggcggaaagaccaggtgcggtggctcatgcctgtaatctcagcactttgggaggccaaggcgggcggatcacctgaggtcaggagttcaagaccagcctgaccaacacggagaaaccccatctttactaaaaatacaaattagctgggtgtggtggtgcatgcgtgtaaccccagctatttgggagactgagacaggagaatcacttgaactgggaggtggagcctgcagtaagccaagatcgcaccattgcactccagcctggttaacaaaagcaaaactctgtctcaaaaaaagaaaaaaagagaaagggtggaaaagagggattccagagtgccaggcacacagattttctggaaggtttacatgaggactgctgtggtttgaatgtgttccccaaagttcatgtgttggaaactcaacccctaatgcaacagtgttgatcagtggaacctttaagaggtgattaggtcatgaaggctctgccctcatgaatggatgaaggtagggtgggttagttatcttgggagggggttcctgataaaaggatgaggttggcttcctccctttctgtctttccccttctccctctcacatgtggtcactctcttgcccttttaccttccagcataggacaacacagcgagaccttcaccagatgcaggcccctcactttcccagtgttcagaaccataaaccaagtgaacccttataaatcacccagtctgtggtattctgttatagcaacacaaacagactaagacagggacactcagtgagctcttctctctacttgatggagcactccctgcgtggtgccttgtatttgtagacatgatgctgtaaatgctctttgagtgtctcgaaggcttttatgtttgaggagtttacagagaagcccgtacagggttcaggtccattctgttgcttctttgctccttagttcctcccctaatctgatgttaaattagatcatagtgtggtccttggaccaatagtatcagtagcacctgaaaatcatgctggaaatacagattcacaggctgctccccagaatactgaagaagaaactctaggagtgagacccaacaatctgtgtttaacaagtccccaggtgagtctgatgcacaaagaaacgtgagctgctgtattagatggtgttgagttcatgccaccgaatcactgacacacacatctgctcactgcttgctcttcgcacaggcccctggatcctcctggaatccctgatccctgttgctcccttgcggagttttctagtccctcttatttgaagcatgtctttcagagcctcgcaccacccagcttgggtatctggtgaattctgtggtctgcatgtccatgtttttgacattctgggaagggtggcccaggctgtgatttgccatctactgctgcaggctatggatggtattcagaagggaggggagatgctgtgtgcgtgttctgaagggtttcccactaaatggagagactgactctctccataagtatttgatttttactttatctcctcgttgacttcacagtgtaagtgcagtttgtctctactgggtgatgcatgcagataaatgtttatgtgaacataagaagtctgcatgtgtgggtgaactctccacatcatgtcatttattgtccatcattacgtatctgtggtgtctagcacattcctctaccttattttctgtcattgtacctacttctacctgaacacgtattaaatatcttattaaaaatacacaaatattatgtttcctcagtggttttttccccctcacattgggccctcctcttcagtggactacagtgtggtacctgcaggtctcaggccttctgggaggttccagcttttcctggatgctctctctctctggccagctcaggctggagcagtgggtgttggtgccatcctgtggctataggtgataaaccaggttgtgttttgacccctagtcttgaatcctggagttctcacatgcgtggatttaaatgctgtgtctttctaagggcagattgtgcccattttccttctctgcctctcaagggactgtttgctgtgtttattgacttaccattaaaaaaaatcatatacattgatgaattagattgtactccataaattatatatgtttgaaaaataaagaatattttttcaatttttttctgatttttacctatcttttaaattgtatatatttatggggtacaaaatgatgttatgatttttccatacagtgtggaatgtttaagtcaaattatcctatccattacctcaaatacttgactttttttggtgatgagaatggtgtttatcactttcactcatcagctcctgatgtcttccatgctagggacaggaaaggctcaacacttgactttccctcctgttttcttagccactgtcaacccttgaatgtaccctccagggttgcctgtcaccttttacacctagcctgatccttgtgcacccactttcctctcagggactgtccttagggagtgactttatgcacagacttaatgtgctcttcctgcctccttcatccccataagcccccatctcagccccatctgattatttcctccctctctcatttcctgttattctgttggttttctaacctgaagggtaactgcttactccttagttttctgccttaatttctaagtcataggctactttcaggctaaaagttttcctccagccatggttttagtctcattctgtaagtcttggtttttagttttattcatttaaaattaatctttaataacttttttgactcattggtgacagagtaattccctctcttcccaccacaccaccctctgtccccaagattctggaagtttgttcttccccttttgtgatcattgttacttaaaactttgagtttttcaaattagaagtttcttctataaatgtatatagagcttggctgggcgtggtggctcacgcctgtaatcccagcgtttgggaggctgaggcgggtggatcacgaggtcaggagatcgagaccatcctggctaacatggtgaaacccgatctctactaaaaatacaaaaaaattagccaggcgaggtggcaggcgcctgtagtcccagctactcgggaggctgagacaggagaatggcgtgaacctgggaggcggagcttgcagtgagccgagatggcaccactgcactccagcctgggcgacagagtgagactctgtctcaaaaaaaaaaaaaaaaaaaagtgtatagagctaataactccttgctttttttttttttttttttgagagtctcgctcttgttgccaaggctggagtgcaatggcacaatcttggctcactgcaacttctgcctcctgggttcaagtgattctcctgcctcaccctcccaagtagctggattacaggcagtggccaccacgcccatgtggggaaaagcaagagagatcagattgttactgtgtctgtgtagaaagaagtagacataggagactccattttgttatgtactaagaaaaattcttctgccttgagattctgttaatctataaccttacccccaaccccgtgctctctgaaacatgtgctgtgtcaactcagagttaaatggattaagggcggtgcaagatgtgctttgttaaacagatgcttgaaggcagcatgctccttaagagtcatcaccactccctaatctcaagtacccagggacacaaaaactgcagaaggccgcagggacctctgcctaggaaagccaggtattgtccaaggtttctccccatgtgatagtctgaaagatggcctcgtgggaagggaaagacctgaccgtcccccagcccgacacccccagcccgacacccgtaaagggtctgtgctgaggaggattagtaaaagaggaaggaatgcctcttgcagttgagacaagaggaaggcatctgtctcctgcccgtccctgggcaatggaatgtctcggtataaaacccgattgtatgctccatctactgagatagggaaaaaccgccttagggctggaggtgggacctgcgggcagcaatactgctttgtaaagcattgagatgtttatgtgtatgcatatctaaaagcacagcacttaatcctttacattgtctatgatgcaaagacctttgttcacgtgtttgtctgctgaccctctccccacaattgtcttgtgaccctgacacatccgcctcttcgagaaacacccacagatgatcaataaatactaagggaactcagaggctggcgggatcctccatatgctgaacgctggttccccgggtccccttatttctttctctatactttgtctctgtgtctttttcttttccaaatctctcgtcccaccttacgagaaacacccacaggtgtgtaggggcaacccacccctacacgcccagctaatttttgtatttttaatagagatggggtttcgcaatgttggccaggctggtctcgaactcccgacctcaggtgatctgcccaccttggcctcccaaagtgctgggattacaggcgtgagccaccatgcctggccaacttcttgctctttttgccactacttttaagctgatatatttggaactgaggtagcctcattctacaggtttagatctgaagtattttaactattgcttcttccagtgtattttctggtttgcaggccagtttcttctttaactcatcagtgacacagtggtttgtatggcttttaatttcaaagaatattttttcaatttgcttttttgttttttgctgatttttatctatgctaattttaactagacatgttcccttgatgggcatgactagattttttcttccccactgcgtttataatttagatggattttcacatctcaagccagttaagagtgtggaaaataggactccttaaagcacagataatgacaagtggttcagatttacaagggtaactcaggtgagagtgtatcattgtacttggcacacagcactgagtaactatcacctttcatttaaatgaatgcagctgtaaatgctttcctagatgtcttgttgatgtttgttaatttctgtagagtttcattctgcccctttcactgtttatcacttgatccttatcacttgagagtccccttattacttgacctgctgttacattatgtttgatttattacaaataccccatcagcctgggtctctctttactccctttgtacacctacatctaaacatagtgatttggattatctcaggatcccacatcctcactgtacccccacccccacccctaccatatctttcttaagttttctagtccctgcttttcatttgtgcttcttaaatcccagccccatgcctgactgtggttcccactgagttctgtgacaagcattctacatttatagatattaaatctttggccgggtcatttacctgggctggaatagggctctcggctgatcctccttcctaaacaccctctcaatgggagaggctgatacccaacatgcaaaccttgttttttacttctccaggcaaagggatgttggaagacattctggagggggtagggtgtgaagatttacaaataatctttgaatatctgcttcatgataggtcttggaggtgccttgtgggtgtggctttggagggatggttacgaggaaattgtggatattaaggaagtcaggaaaggaaaagatgactcactgacaattcaacaattgtcctaagggactttctggctgcttgatgccctagaagccaggccctcacttctgtaaatgctggggactgtggatacagaatttaaagggtcaccaaaaaaactcagtaatcaagataaacaatattttaatgtaatatctttaaaaataaaatcaatgcaaaaagaaaacacccctgttgaacaaaacggtcagacttatgcctcctttccaacaccgccccacctccaccccaccctccggaagtttcctccaagccgcacctgtaccccagcctccaataaaaacctcgggaatttcctgatcaagcttcggatccccaccaccaccaggggatcttttgctgttcaccccaagttcagtctgcatcccctaaaatcctagggacacgcgaccagtctcccccatctgcattccgggagtttgccccaaaccaatcctgctctccgcgaaaatagccttggggttccctgtcctggtacaccctcctactctaggggacaaagggccggtgtcgcctccaaactggtggttcccgcagagcatcgtctctccctgagccgcgtctgtcccgacctggcacctgctcagggaagggcgcatcagggcggagacttgcgtagtgagctcagctcacccgcaccttgaaggtcagcgcacactggccacccgcagagcaccgggaccacattttgcagaatccttcggcagtcccgcgatgccttcgcggtcagcagatctcattggtttacagagaaacttgtcaacgtcacttgggcatcttaagagtgggttcgtaaacttggttgtgtgcgctgtgcagatgtcagtcaccctgtgtggtgggcaaagccgacttctccgcctctgtagctccgaaactacaatccccagaggcctctgcggtcacttccgctcccctccctacccttcagtgtgtagcgttgacgtcagaaacacttccggtcggtggcccaggcgcgttaagctggttgggacccgggaaggcctccctcttaaggtctttcccacacctctgcaccttgttacctgactttcggcttcaggatccgcagcgtgcacccgcgttccgtgagtgccctataggcagtcagcatgcccctctgcgtgtccctgtgttacggggacgccggctgggagccgcagagctatctcagaactagggcgctctcctttgggcacctccaggccattttcctttcattcgagcccacagggttagagataaaccctcactccgttgcttggggacaagggcttcactccctgtcccgagcttgcggctgagcttgagggtggctgggtcatcctggccccccactggatgggaattggctgctctggtgatttctgtgacatcccagaccccaactgtggggctctggagcggactgcgcttcacttcgtggggagggtgtttccacctaggccactcttatttctcttcacatccccagatctgtcttctgagactttgcccttctccaggaagagcactcaggagaccaggaaaatggccacagggctcctgagagccaaaaaagaggtgagaattaactgtaattctatcttggctgtcaacagaatgggtcccattaccttttcttgtcctggaggctgccttgttggtattgggcaaagtcattcctagccctagtcattcctagtccatagaacaaggaggattttgatatagtcttgtagagcgtccgattctgtcgctgttcagggcgccacttgtaacctgcacggacctggtggactgaacaaaaggaataaaagacaagaaacaaaaaagtatatttggaagaaggggtcgggggcactttgtctctagtggacaagggccctgagctttacacaaccctcccgtatttattggtaaaacagataacaagttagggggtggtgattgtcaggtaattgtcagttggccgtttggttcgcaattgcaagactgcatccttccaacaataggcgctagatttcctggtagatcacttcaaggagccaggcgccaggcagtgatggctctcagcacatcttttggtggcagtgtgcgtttgctcacatcctgcattcatgataaacagtttaccgtttaatcatataacctccagtggaatgctgagttggtcacaatccctttggtcttttcggctccaaacatagtctgacctgaattttacctttgagttcattcctagtcctggaagagtgcctcgttctaacaggagtcttccctcagcattcctttctgctccatccttaccgcagtcactcatgaagtagttaattgtgaacaacacatatggagcagtttaaataaaagtaaagagacatacatgcgtaattgttcagtgatgtggatgaagggcagggacagcacagatgcctgtgatttcaaatggttagggaggcctcctagaagtagggctgtctcaattgcccctgactggtttgttaagttggagattggggggaaggcattccagtgggaggcggcaaggaagcatagatagtttcagaggctggactctcagtgtggaaggattatggtggccagtggacttgcttaagattgaattttttttttttttttttttgagaccgagtctcactctgtcatccaggctggagtgcagtggcgccatctcggctcgctgcagactctgcctcccaggttcacaccattcttctgcctcagcctcctgagtagctgggactacaggcgcttgccaccatgccaggctaattttttgtatttttagtagagacggggtttcaccgtgtcagccaggatggtctcgatctcctgacctcatgatccacccacctcggcctcccaaagtgctgggattacaagtgagattacaccacacccggctacctatgcatatttaaaaatcaaccttggccaggcgtggtggctcaggcctgtaatcccagcactgtgggaggctgaggcaggcgaatcacgaggtcaggagatggagaccatcctggctgacacggtgaaaccctgtctctactaaaaatacaagaaattagctgggcatggtggcaagcgcctgtagtcccagctactcgggaggctgaggcaggagaatcgcttgaacctgggaagcgggggttgcagtgagctgagatcgcaccactgcactccagcccgggcaacagagtgagactccatctcaaaataaataaataaataaatatacatatgttaagatacagactatctattcacacatagaacaaggagaatttcgatatagtctgacctgaattttacatttgagagcactttcagcttctggcaattgggacatttccaaaattccagattccctgcttctctgaaaataaatctgccctaaatctgcactgttctttggtgtcagacaatttgagctgaacaacgtctttatcatttggacgtgaccttcagagtatcagctgcactttctgcagtgtcctttatactgaggttgaaaccattgactacctaacatttcacccccctctcatttttattacctacctgacccctgaagggtttgccttttccacctctcggtcagggtggggacaaatcagaaaatgctgagtgccaggctgagcagggtagactttgtctttgagtaagctgagttttgaaggatgttaagaagggacttgacataaggaagtcaatggtatgtgggaaatagtgattgactgtgtataaggacttaaggggaagcgttcttcttttttttgaaacggattctcggtctgtcttccgggctggtgcgatctcagctcactgcaccctctgcctcccaggttcaaacgattctcctgtcccagcctcccgagtagctgggattacaggtggcgccaccaggcccagctaatcttttgtatctttagtagagacgggatttcaccatgtttgccaggctggtcttgaactcctgacctggtggtccgcctgcctcggcctcctaaagtgctgggattacaggtgtgagccacagcccccggccgaggggaagcttttctaagccctgagattggtgacgatgatgcccctgacttaattgaatgcaattaacattcattaagcaccaacacagttgccaggctgtttaacagtcatttttgatatgggttaacttggttatttcagatttgccttgactatccttatcaagaaatctgagtggaatttagacaggaaaagagatttcttaattctggactccagtggtggggattatgcattcctggatgttatcagagcaacactgagaattctgtttctcatttctaaaatagttaattcatttgagagtgttaataccaggaatacataagaaatccaattcaggacatttcccaaggtaacattgaatattttttgtgcgtactttctcttttctttgaggcggagtcatgctctgtcacccaggctgcagtgcagtggcacgatcttggcttactgcagtctccgcctcctgggttcaagcgattctcctgcctcagcctcccgagtagctgggattacaggtgcatgccaccacgcccggctaatttttatgtttttagtagagatggggtttcgccatgttggccaggctggtttcaaactcctgacctcaggtgttccacccacctctgcctcccaaagtgctgggattacaggtgtgagccactgcacccagcctttttgtgtgtactttcttcaccactcccagtgttaccagggaagcattctttctgattggctgggaaaagtcagaagtttgtggtagctgacttttcctgtgccacctccttcattctcagtaggtctacccggaactgcctcctgtatataaacaacttgttcttcaatgtagctttttaacatagtatttactcaggaaaaattaaagggcatgagcatttaaatagttgtttaagatgaaacctctgtgtctctcatgcctagcacacatgaaatgtttggtgcatgaaggaatcacaaccttaagtaaacgatttgaaggaactaagtaacaaaggagtttctgttgtttgctttggtttgttattttgggcatgtggttaatcacatgtttcaggagcgttgggtagaatttccagatactcttgatatgcatggcatctgaattatacaaaataatcaaagcaagactatcttaggacattaggtattactgccaaggacctttgcctgagaggataaattaaaatttgtgttaaatttgtaacaatgagatgaactggcaggcacattatgttattttttttcttagcatttttccttttccttggtgccatacaacaaacttgagtgtctgctatgtgcagaacactcagtagattacagttaatgatgggtaaaacacagtctgcacactcaggagtcttccattttattttaggattcctttctcatttggatttaatttaattttatatgcgctcacacccctgcaaacatattttgacaggccctaatggtaaaatcataatggagtaaagttactggcagtgtatctacccagctctatttttaaaggtgtagaaacagccaacacttatcccactgaaaataatttccatagtaatccattgaatggatgaactcatccattgtttcccaatttttggactcctgtttccaatgtttaactgttgcaaataatacttctatgatcagctttgtacatgaaattcttatataggtttttattctcatacaaaatatgacaaggtgaatagacatgactgttttgaagcattgggcacccacagcagttggagatttgaaccctgccagttttttttttttttttttttgagacagagtctcgctctgtcactctgtcccactgcatcaggctgggatgcagtggtgcaatcgatctcgcctcactgcaacctctgcctcccaggttcgagcaattctcttgcctcagcctcttgagtagctgggattacaggtgcccgccaccacaccaggctaatttttgtatttttagtagagacagggtttcaccatattggccaggctggtctcaaactcctgacctcaagtgacccacctgccttggcctcccaaagtgctggaattacaggcatgagcaccgcggctggccctgaaccctgccagttctaaagaatttgaacttccaattacttctttcttttctgagactcccttcttcaccatgtgtttctttatactgtgcaatttttattttattttattcatttattattattattatttttgagatggagtttcattcttgttgcccaggctggagtgcaatggcatgatctcagctcactgcaacctccgcctcccaggttcaagtgattctcctgcctcagcctcccaagtagctggaattacaggcatgtgccaccgtgcccagttcattttgtatttttagtagagatggggtttcaccatgttggtcagattggtcttgaactcctgacctctggtgaactacccgcctcggcctcccaaagtgctgggattacaggtgtgagccaccacgcccagccctactgtacaacttttatttgcttttattttaattattacactgtgcagattttgattaccggggtagacctgccaacttaggtctctttcttctctcacatgaaagctcacatagtatcctgatttgtttccaaatgttgacatggtcctttgccacccactacatgtttctgtaatcctcgttttccccaacattgcagtaacatcacttttcagaaacctttagtgcctcatttcagtgtcttagatatttaggacagtcttcatttcaaatattgtatcctgttgtctgatgtcatgttctgattattcagtctgaaagtgtgtttattgttaccacaggggagtcatcttatgtgtacttttttttttttttttttttttgagacggagtctggccctgtcgcccaggctggagtgcagtgtcacgatctcagctcactgcaagctccgcctcctgggttcacgccattctcctgcctcagcctcccgagtagctgggactacaggtgccgaccaccacgcccggctaattttttgtattgttagtagagacggggtgtcaccttgtcagccaggatggtctcgatctcctgacctcatgatctatccacctcggcctcccaaagtcctgggattacaggcgtgagccaccgcgtctggccttgtgtacttttaacttagatacatttactttttatccactcagctgaaaaaagaggagaaaaataaaagtaggtcaggtcaatctgtttcctttcccatttaatgaattcatgcccaggagtgagtgagaaatgggaggactgaatctgctgttctccaagactagcttaggagtttctgacatcatgggcatcccagcaagccaacggtcacattagtcaccacgtatttttcatatcacgtgatccctctatcagtgtatcagcctttgctgtataatgaacaatcctaaacatcaatggcttaaaacaaaatcacttattagcacataatttggtaggttcatattttgggctggccgcaggtaggttttgcagatttcacctggtcttgtcattttgctgcagtcggctggcattttgaccagggctggaggactatccatgtgtgacaggaagctggttggctggggtgcctagtttcttcttggttctcttccatgtgggcttgggcttggtcaaatggtcttgggtttctctatgcaggaagagaggacagccccaattaacaagtagttttaacgttttggcttttgtcatgttcactgatgtccttttggccaaaggaagtcacatggccaagtccagagtcgtcatagaacgggataacataagggagtagatacagggagacatgatttattggtcccaatgattcatacccttaccatgtgcaagattaactcacccccctcccaagatccccaaaagtttcatcttgattcaaaagtccagtatcttatgtgtaacagtctggatgtagctaaagcttcttcactggatcctttttgagtcagatacctgtatactaaaaaggcaagtcatttgtttccctccaccccaaacattccctacctaacatacagtggtgagagagagatactgcagtagatgctcccattcagaaaggacaggaattaagcatagaggaggcctctccattttgaactgtttcagatcctttggacttccttgaaagctctatgggtttcccatgtaccagatttgggactgctctattaaacaaaagctgaaatcacagtcagacaggcctcacatctttggcaaggtgtcggtgctatgggacaatgcccataagaatctcagaagcctttttgtccagcgtggagactccactaggcatccccttaacacttcagaggttctaaagtttgggtcttttagccaaacttttgattcgaactttactctgagtttatttttttattttgagacatgtgctggctggagagactgaagatgtaaaataattttatttccaagctagcaagtcctgacttgtctatatttcctctgaattacgcttgcaagctgtataattgcttcttcagctcttctgtttctggacattattatatgtcactagaaacatccaactgaattttttttttttttttttttgagatgaagtttcactcttgttgcccaggctggagtgcaatggagcgatatcggctcactgcaacctccacctcccaggttcaagcaattctcctgcctcagcctcccgagtagctgggattacaggcatgcgccaccacacctgggtaattttgtatttttagtagagacggggtttctccatgttggtcaggctggtctcaaactcccaaccttgggtgatgcgcctgcctcggcctcccaaagtgttgggattacaaatgtgagccaccacgcctggcccaagtgaaacttttaacaggctttttggagatctctttagctagatccaaaaattcatcaggtatattttctgttttccaagttcatgcaggcaatagctttgctaatatataatactagttgccttgttcaagctgccatatcagtttcatcactcctttcccagtccccactagcagtttgtttactggttttccagcctgtgctaatagttttcctggatgctttccaagcctctgcccatgtcctgctcccaaagctaatgccacatgttttaggtattttgttatggcagcacttcacttctgtgtaccaacttagtggcctaaagaacatagcggcttaggcctggtacagtggctctcacctgtaatcccaacactttgggaggccgaggcgggcggatcatgaggtcaggagttcgagaccagcctggccaacatagtgaaaccccgtctctactaaaaatacaaaaattagccgggtgtggtggtacacacctgtagtcccagctacttgggaggctgaggcgggagcaggagaatcgcttgaacccaggaggcagaggttgcagtgagccgagaccacgtcattgcactccagcctaggtgtcagagtgagactatctccaaaaaataaagaataaataaaataaaaccaaaaaaaaaaaaaaaccaaacaaacttagcagcttaaaatgaaatcattttttcaaaatcctgtgggtcagcaagtaggcccggcatggctgagctgatcctcttggcatcctcatgtggctgtagttagctggctgctcagctacagctggatggtctcaacctgtctggtggttgacagcttggttggctgggatgcttcaattcctggttcttctccatgtggcctcttcagcaggcaagctcaggttattcacatggtggtctcaaggtttcttgcacagcgagaaggccagccctgaactcagatgcctctcaaacatctgcttgcatcatgtttgctggtgtcccactggataaagcaggtcccatggccaagcccagggttaatttaggaggagactgcatgaagggtagaaacagggaggcatgattcactggggccatcactgtacccatccactggttagatacaatgcttttggccgcaagcaacagtaaacctaatttaggctgttctaaacaataagtaacttagcctatataaaaagaagttcacagagagagtgcactttggggttggtccttcagctccataagcttcccaaggactggggtgctttcatctctgcagtctaccctgttctctacagtgtcagcctcatccaggctggttcccctcaaagccataggatgtctgccaatagcaactttgtttaattctcacaatggccccataaggtaagtactattataatatcgattttataggaaattgagacacagatattaagatatcaacgcaaagtcataggggagggaggagagaggggactgtaatttgaacacagtttgtctccagagtttgtgcttttagccactgagtagttgttaaactttagtgtgcatcagaattacttggaagccttgttcaaacattgctgggctccccccgcaatttctgattcagtagccctaggatggggactgagaatttttatttctaacaagttcccaggggatgctggtgctgcaggttcagggaacacacattgagccagtgcactaagccctgctgcctcttttgggtaatctgtgcccatgtttctgagcatcaggaaaagtgcttaattcctgtgactccatcttacaaatgacgaagtcttttgctagaatcctacggtaaggcttcttgtggcctgttggttaccattcatttttcatatatttatttttcagctggcaagcagatgaattaactcccccaagcttctagctgtgtttctactcagtgggagagatttggagtgaatcatgagggtcaaccacacagtgtctacaatgctccctacatgcatggttcacagacaaaccatgagttgttccggggctggaggaataacggttgtattaaatgtgttaaagtaacactaattgctctgtgatgtagctccttcgtgggagattttcaaggggtgtatgtgtgtatgttctgagaaggggttgtaaaagcaaatcacaacagggactaggcagatacctgaatagcctttttctctccagtgtttaatgatgaacagtttcagacatatggaaaaaaccaggaagccttgtacattgaacactcacatacccatcacctagattctcagtgagtacctccttctcatgaacttttcctgatcctcaatcctacagtgacctctccctcttgagattactctgacccagtgattcacaaccatcacactacttttaggagcctttgaaagtacaaaagccccatcccctggttttacggatttgtggtgggactcaagaatccataatttaaaacaccacccaggtagctctaaaatatagccagagagagatgaggtatgagaaccaaagccctcactcatctgtgctcttctcttgcgattaagtacattgggactggctgggtttggggacagctatcgatataactgagtgtaggtagagtcttaaggccatttcatagtccagccagtgtagaatagtggagctggtaggggacaggaaatgtagggaggattccctgggaagggtacagtgtggaattagttttagagacacaatgtcataccctcaaggagtgatggaggcattctgagaaggggatgcaaaatcaaagagacaaggcatgtacctaaatgaatgacgctggtgaggcagtctccaatagtgtgttgcggctgatagacccccagcatgagtcaccgtcagccaactgtggtcctacagcagtgcaaagcccagggtggtcagatttatggatttttaacataacccatagattgagattttcatatgaaatcttccaacatttaattgatataaacacaagttttaaagcagtatatgggtcaaattaaacccctctatggactgcagattgtacctaaagagaataagtgttgggcagggaagaatcccagtgctagatttccagactcatttggaaatctcaccgaacttccatgccaaggacggttatatattcccatcctccaaagtacagctttctaggtagcagaggttcgtttgaaactttgttgcttgtctaataataataaatcatttttggttatttaaaaatatttgactgctaagtgtttgcagattctgttgtagacaccagggcaatcacagtgatccagccatgcacatggaactgatgtcttagtgggaagtcagaaaatagaaatgaatataatgtattatcttagagttaaggcaacacaataaagcaggagaggggaatgaaacccgcatgagagcatggaattttacatagaacggccagggactgcactgggcattttgtctgagcccttcacagtaatcctaatcctcaccacaagctgtgagataagcactgttatttttagttcgcaggagaaactgacgtgctgagcagctaattcagtgcctgaggttacactagttgtggacagagatgggttccaaatccagatagtatgggttgaatccacgctcttcatcaccacccactttccctccttaggcctgagcaggcacgtggcagcatttggtagaggaaggagtgagccctgctgtaggaactatatatattggtgagttatttgcccccaagccccagaggcaccactgcttcaagtagaacaaatagtgagaccaagtagtctcagaaaattttcaaactcagcaagataattctttactatttagttgtacttgtgtggtgtcttcttctccctgcctagttttgaaacgccctctaggtaagggctttggttttgtttgctcttatcctccctagcagctagcctgggatattgacagtaagtaacaggtgcataaatgatgctggctcggcagagataggagaataatggtctttcactccttggtgccaaggtcacaatccaaagtagggtctagaaatctttcctacttccctcagggaagccttttgacctctcattctttttttttttttttgagacagagttttgctcttgttgcccaggctggagtgcaatggcgcaatctcggcttaccgcaagtaactgggattacaggcatgcgccaccacacctgactaattttgtatttttagtagagacggggtttctccatattggtcaggctgatctcaaactctcgacctcaggtgatccgcccaccttggcctcccaaagtgctgggattacaggcatgaaccaccgggcctggccttgacctctcattctaaagtgtgggagggaaagacaggctcctgggtgagcagaggtgtgttttgtgttaaaggcgttcgtggcattcagggatgtggctgtgtacttcacccaggaggagtggaggttgttgagccctgctcagaggaccctgcacagggaggtgatgctggagacttataaccatctggtctcactgggtaagaatggcctcccttggcacttaaaatctgccctacagagtattttccactcatcgtgaggaagggctacctgcagagcacctttcccttagagttgagcttgaaaacaatttacttttttcctctgggtaaatctggatttagtagaattgaaagcagacagattgatttattcatgttatggatgacactacatttccaggcctgtttcccaaggcttgtgctctctctttattttgcttcaaacccaggaaatttttcatacaccaagtgttcataatatgccatctttctgactggagtcacctttccttagtcaacccttctacttcagagagagaactattcataggtcttttttatcctctgggtttcctcacccatttcagctctgagttctagaatgccctcttgagcccataaccaacaatgtcctcattttcttccctatgaacagaaattccatcttctaaaccaaaactcattgctcagctggagcgaggggaagcgccctggagagaggagagaaaatgtccactggacctctgtccaggtgagtgttgagtgtggggtagacgggataatccacagcttggcagataggaaggaggaggcatctctcagatactgggaagaagctcttcttcaggcctcctaagccaagagaaacgttgcctgacatggtcttctttccggaacataatcttcagttgagggagggacttccctggttcccttgtctcttccctacaccaggaagcctcccttcctcatttgtcttctccgtaatgcttagtctttcctcattcactgtcttctttctcacctgatcttaaaaattgcatctacccatgaatgttaagtctacgacacttctagatactttctagctactcttatgctaagattaattgattaactccacctctccaattcccataacttattacacaatacttaagctatgactaataataaaatacatactcatgtgccaatgtcccagcttaagaaataaaaaatgacctaaacagtcgaaacccctatttccccttccctgatggtatcctctacccatccctccaatggaattgtttttcagtattagggatttgtaattctcatgcatggctttatcatttccttcatatgtatgaatcgctaaatcatctatattgttgtttggcatattttaaaactttatatcaatgtcatcatattatgtatgtattttgttttcttccctgagactaattttgtactatgttggtatatgtagctctgcttcattcatttttgtggctatataatattgtattttatgcataattataatacaattcatttatccattccatttttgttggacagttacagttctaacagtgtattcttttgacccactaaagaatgttgctgtgaaccttctcatagatatgtccttgggcacataagcacccgtttatctaggatatgtacctaggaataggacagctgagtaaaagaatatgcacctggtcagtctgacaaggtaatgccaaactattctccaaagttgttgtattagtgttctagggctgccacaacaaagtaccacaaactgagtggcttaaacaacagaagtttattttctcacagttctggaggctagaagtagagatgaaggtgttggtagggttggttccttttgagggttgtgaggaagaatctgtcccatgcctctcctctagcttctggaggtttgctggcaatccatggcgtggaggagcagagtcccagtctctgccttcatcttcatatagcattctccctgtgtgtgtgtctctgtgtccaaattttccttgtttgtaaggacattattcatactggattaggacccactctaatgacctcatcttaactaattacatctgcaacaaccctgtttccaaataagttcatcttttgagatattaggggtttggactccaatatgtcattttttggggaaacagaactcaacctatagcaattgcttacactcacatagcattttattgtttgaggattctagttgccctacatccttcctaatactttgtgtggtcagactttaggttttgatcatcttttgggtatgaaatggcctctcatagtagttgtaatttgattagttttgagtttgagcatctttttatatgttcattccttgactggccttggtgtttgctcttctgtgaagccttttcaattcttttgcttttcttcttgttgatttgaatttgaatttttaaaaataaatcattgaggtgaactctttatcagatgttccaatctgtggcctacctccttgctttttttatttttttttattgagatggagtcttgctctgtcacccagccaggagtgcagtggcatgatctcagctcacagcaacctctgcctcccaggttcaagcgatcctgctgtctcagcctcctgaatagcggggactacaggcgtgtgccaccatgcctggctggtttttgtatttttagtagagacggggtttcaccatgttggccaggctggtcttgaactgctgacctgaagtgatccacctgccttggtctcccaaaatgctgggattacagacgtgagccaccacgcccggcccccactggcctttttttttttttttttttaatacagagtctcgctttgttgccaggctggagtgcaaaggcgcaatctcggctcactgcaacctccgcctatcaggttcaaggattacagacgtgagccaccacgcccggcccccactggccttttttttttttttttttttttttaatacagagtctcgctctgttgccaggctggagtgcaaaggcgcaatctcggctcactgcaacctccgcctatcaggttcaagcaattctcctgcctcagcctcccgagtagctgggactacatgcatgccaccacgcccggctaacttttttgtatttttagtgttagccaggatggtctccatctcctgacctcatgatccgcccacctcagcctcccaaagtgctgggattacaggcgtgagccactttacctgatgccctgcttgctatttaaacaaactgtgaaataatttgtctcaatttataaaaataatacagagagtttccatttactcttcaccctgctttccccaatgataatatcttatataaccacagtacatttcaaaaccaggtaactgacattggtacagtactattgagtaaactaaagactttattcagattcagatttcatcagtttttgcatgtactcttttttttaattgttgctctatagtagtatgaaatttcattacataaataagatttatgtagccaccatcaccacaataaagatgtagaactcttctatcactacaaagaaaactctcctgtgctatcttccctccaatcttaacccctggcaactactgatctgttccccatcactataattctttttgcttttttttttttttttttttttgagacagaattttgttcttgtcccccaggctggagtgcagtggtgcaatcccagctcactgcaacctcggcctactggactcaagcgattctcctgcctcagcctcctgagtagctgggactacaggcatgtgccaccatgcctggctaattttgtatttttagtagagacggggtttcaccatgttggccaacctagtctcgaactcctgacctcaggtgatccacccacctcggcctcccaaagtgctgggattacaggcgtgaaccacttgtgcccagcctcaaattttatttctactaaaatatataattattcttatgctacatttcttcatgtgtcagtctttttaaatttgtgtattttaattaatttgtccacttaacctcagcagttaaatttgttggcataatgttcataatattcccaaatttctttaaaagtgtgtatatttctctagtggtgcttcctctttcattccccatattgtgatttaaaacattttgggggtattttatctaaaggtttattaattttatggatttttgcaaagagtcaacttttggtttcattgattttctgtagtattaatctatatcccatttaagtgatttttatttgtatctttttctgcattctactttctttgggtttaatttcctcttcttcttacttcctgaggtagaagcttaggtcattggtatagaccttcttttctaatacaatcacatatatatctgtacatttatttctaagccttgctttagctgaatcctacaacttttggtgtgttgtgttttctttatcatttagttcatgatattttctaattttcttattttttaacctattggttgtttagaagtgagctgcttaatttccagatattcaggtattttctaaatgttttatttttattggttttcaatttaattgtattttgttgagagaatgtattctgtatattttcaatctttcaaagtctgttgagattaattttatggcacagcatatgatctatttttgtgaacatcctatgagctcttaaaaggaatgtgtattctgcagttgttgagggtactatcctataaatgtcagataggtcatattggtaatatttttcagatgattgatatccttactgagtttttgatcttatttttctatccattactgcaaaggtgtgttaacatatcattgtggatttgtctatgtctctgtagtgatctctaaggttttgattcatacagttagtaattttgctatgaggcacatgtacattaataattgttacgtcttcttattgacctttttatcattatggaatttcctcctttgttttttagcaataccgcttgtcttcaggtctgttatctgatattaatatagctactccaggcttttttttttttgagacagagttttgcttttgttgcccaggctggagtgcagtggcactttctcgggcgtggcttggagatgccacgaccaaacacctcttaaaggcctcctggcttcaagtgattctcctgcttcagcctcctgagtagctgggattacaggtgcccactaccacgcctggctaatttttttcctatttttagtagagacaggatttcaccatgttggccaggctggtctcgaactcctggcctcaggtgatccacctgcctctgcctcccaaagtgctgggattacagacgtgagccaccatgtctggcccattccagctttttaatatttactctttccgtggcatacctttgtccattctttatatttcaatctttttatttgcgtctttgtatttaaaatgagtctcttatagacagcatatagttgatttttttcttctttatccagtttgccaatctctacgttttgttggagtattgaatgcattagcactcaaatgttattgttgataagtaaggttatttctacttttgccagatttttctttgttttctccaatgtgtttttacttgctctgttttctttagcctacttttgttttaatgttttaataaaatactttttagattcttttttcttttttttttttttttttgagacatagtctcactctgtcaccgagactggagtgcagtggtgagatcttggctcagtcatcctctgcctcctgggttcaagggattctcctgcctcagcttcccgagtagctgggactaggggcgcacgctactacgcccagctaatttttgtattgtcagtagagatgggatttcaccatgttggccaggctggtctcgaactcctgacctcaagtgatctgcctgcctcagcctcccaaagtgttcagattacaggcgtgagccaccgcgcccggctcctttttcgatcttcatgttaatttctctcagctatctagctatgtatctgccttgtgtgtgttcatgacttttccagggcttacaatatgtatttttaacttaaaccaattagagttattatttgtttaaggtaatgtaagaatctcacaagagtatgtttacattcccctcatcttcagtgctgttgtcatatacattatttctgtaaacatcctaaacccaatactacagtgttaaaatttttaagccatcgtatagtaatacgtatttttaaagaaattaaggtaaatgtatgtagaaatatgtgtgtgtgctttatatctgtcacatttcttatgctcttcactccttaatgtagatacaagttgccatctgataccattttccttcatcctgaaagacttcctttaacatttagtacagttacctggcattggattttccattttaatctgaaaagattattttctctccagtttgcgaaaattaactggagatagaatcgctggttaacatatttttctctggcattgcagtgtcttctggctttcatagttttgtaatttttgttgagtaattattatattgttcttttatattttgatcttctctggctgtcttcaagattttctcgttatctttggccttcagcagtttgaccgtgatgtttctatgagccgttttctttgtgtttctactacttaagcattatgaagcttcttggctctctaagttttattttctattcactgtgagaagtacttggctattatttcaatatttttcctgtcccttttactctttcctctcattctaggactcccaatttacctgtatattggactgctggaaatgtgtttctgaagattcatattgtctcataagcttctgttcatttttcttcagtcttttttctcttttttgaggggtgggtggatatatgtaatttctattcttttattttcaaattcactaatctttcttctttttctgtttgctattaaacctgtctagtgaatttttaaatttcagttgtttttttctttccccctcccctcctctcccctcctctcccctcccctcccctcccctcccctcccctcccctcctcttgtttctgtgggttttaggagtgctctcaggcaagaaagccacaaacaaaattattacccctttctgttgcaattttttgagcataaactcttccccatcttctggctggttatgtatattttccagtgcctttgagtagttatttgttatattttatccagtcttattattttctgctgcagggttcttgtgaccatttcagtctgctggcattttcgttagtgggcttcctcatacttatttttgaattgatttttggaaattgcttcaaaattacagaatatttgcaaaaataaaaatagtagaataaatatatatggtgcagtgagttgtatgtggtttgtccccaccacaactcatggtgaaatttaattgccagtttaacggtattgaaaggtggtggggcctttaagaggtgtttggttgtggcatctctgccctctcgaatggcttatgcagactgggttagttcttttggactgggttggttctcgtgagatcaagttgttataaaacaaggcttcctctgatgtttggcctctttgcatgcacttgctttcccttcctctttctgctgtgatttgaagcagcatgagaccatcaccaaatgggctaccatccaacctccagaattgtgagccaaataaacttttttgtaaattacccagtctcaggtattctgttatagcaatacaaaacagattaagacatatggcatatatgttattatataaatggcatcataaaatgacctactattttacttagtttgctttatcatttattcatgtgctcttttgcatgcatacccttcctccttccttcccctttctcagtacatatgtatgtatgtgtatatgtatatgtatgttcatatgtgtttgttttgtttttgtctttgtttttgtttttgttttttgagacagagtctcgctctgtcacccaggctggagtgcagtggcacgatctcggctcactgcaacctccgcctcctgggttcaagcgattctcctgcctcagcctcccaagtagctgggattacaggtgcacgccaccatgcctggctaatttttgtgtttttagtagagacagggtttcaccatgttagtcaggctggtcttgaacacctgacctcatgatctgctcacctcggtctcccaaagtgctgggattacaggcgtgagccaccacccccggcctgtaagtgtttgtttctgtgaattttctaagaatgtcgatattgtctcatataaccacagtgtggttatcagcctcagtaaacttaactttgatacagtcattttgcctgttatctaccattcgtattataattttgtcaacatatagaataatatggttttttactttccagaacataatctagtccaaggttagttagttcattttcatgtcatgtctataattattattaagggaagggaattattatttcaataatctttctctgtcttttataacattgacatttcatttgtttatttaattttagattcagagtgtacatgtgcaggtttgttacatgggtatattatgtaatgctggggtttggggcttctattgaacctatcacccaaatagtttacatagtacctgataggtagtttttcagcccttacctccatcctttttcccctgttttggagtccccagtgtctattatttccatctttatgtccgtgtgtacccattgtttagctcctacttgtgagaacataggttatttgattttctgtttctgcattgattcacttaggatgatggcctctagctgcatccatgttgctgcagaggacatgatttcattcttttttatggctgcatagtatttcatggtgtgtgtgtaccacattttatttatccagtccactattgatgggcctatacgaagattccatgactttgctgttgggaatagtgctgcgataagcatacgagtgcaggtgtcttctggtagaacaatttattttcccagtcttgggattgttggattgaatggtagttctatttttagttccttgagaaatttccatactgtttgccatacaggttgaactaatttacatgaccaccaacaatatataagcattccctgttctgtgcatcctcactaacatctgtttttttgtttgtttgtttgtttgtttaactttttaataatagccattctgactggtgtgagatggcctatcttcttgtgggttttcttttcccatccttcactggtaccaagatctctttgtggttgtaatttgtatttctctgatgattagtgattttgagcattttttatgtttgctccctgtttgtgtaccttcttttgagaagtatctgtttatgtcctttgctcactttttaatgaggttatttgggtttttgttgttgatttgtttaagttccttatgtttctgcatattagtcctttgtaagatgcatggttcgcaaatgctttctcccattctgtaggttgtctttttactctgttgattgtttcttttgcagtgcagaagctcttttgcttaattaaatcatatttgtccatttttgtttttgttgcaatcgcttttgaggacttagtcataagttctttgccttggccaatgtccagagaagtttttcctagttttcctttaggaattttatagtttgaggtcttacatttaagtctttcatccatcttgagttgatttgtgtatatgagggggaagggtccagtttcattctcttgcatgtggctggacagttttcccagcatcatttattgaatagggtgtcctttccccattgtttatttctgtcagctttctcgtagatcagttggtagtaggtgtgtggttttatttctgggttctctgttctgttccgtagatctatatgtctatttttgtacttacaccgtgctgtttcagttaatatagccttgtagtatagtcaaagtcaggtaatgtgatatttccagctttgttctttttgtttaggattgctttggctagtcaggctttgttggtcccatatgaattttagaattgttttttctagttctgttagaatgttagaatgacaaatgatgttggtaatttgataggaattgcattgaatctgtagattgctttgggcagtatcatcattttaactatattgattcttaacaatctatgagcatagaatgtttttccctttgtgtcatctgtgatttctttcatcagtgttttgtagttctcctcgcagagacctttcacctctttggtttgatgtattcttaggcattttgtgtgtgtttgcattcgtgtggctattgtaaatgggatcttgttctttatttggctctaagcttgaatgttactggtgtatagaaatgctattgatttttgtacattgattttgtatcctggaactttactgaatttttttttttaatcaggtttaggagtcttttggagggacctttagagttttctaggtataggattattttctaggtataggattttctaggtaaaggattcttggcgaacagagataatttgactccctcttttcctatttggatgccttttatttctctgtcttgcatgattgctttctctaggacttccagtactaagttgaatacgagtggtgagagcagacatccttttcttgttccacttcttagggggaatggtttcagctttcgcccattcagtatgaagttggctgtaggtctgtcacagataactcttcttattttgaggtatgttcctttgatgcctagtttgttaaagatttttatcatgaaggggtgttggattttatccgatgctttttttacatctattaagatgatctttttttttttttttttttttttttgtttgagacggagtcttgctctgtcaccctggctggagtgcagtggcgcgatctcggctcactgcaagctccgtctcccaggttcacactattctcctgcctcagcctctctgagtagctggaactacaggcgcccaccaccaagcctggctatatttttgtatttttttagtagagatggggtttcaccgtggtctcaatctcctgacctcgtgatccgcccgcctcagcctcccaaagtgctaggattacaagcatgagccaccacacctggccggtttttgtttttaatcctgtttatgtgatgaatcacatttattgaacactgacattttagaatacaattcctcagttctcactttttttttttttcttttttgagatgaagtctcactctgttgcctaggctggagtgcagtggcgcgatctcggctcactgcaacctccacctcctggtttcaagcagttctctgcctcagcctcccgattagctgggactacaggtgcgtgccaccatgcctggctaagttttgtatttttagtagagacaggatttcaccatcttggccaggcttgtcttgaactcttgccctcaggtgatccacccaccttggcctcccaaagtgctgggattacaggcgtgagctaccgcgcctggccagttctcactttttaaaatagctttactgaggtataatttacatgccataaaattacttattgtatgtatacagttcaatatatatatattttttttttgagatggagtttcactgttgtagcccatgctggagtgcagtggcacaatctcggctcactgcaacctctgcctcctgggttcaagtgattctcctgcctcagcctcccgagtagctgggattacaggcatgtaccaccaggcctggctaattttgtatttttggtaaagacagggtttctccatgttggtcaggctggtctcaaacttccgacctcaggtgatccgccacctcagccttccaaagtgctgggattacaggcgtgaaccgccgcacctggcctgtgtgtgtacagttcaataatttttagtaaacttatagagttatatgattgtcacctctattcaacatttctgtcacaccagaaagttctcatgtgcccatttgcattcatccgtcctcccatcagaggaaaccattgatttgtttactgtctatagatttgctgtttctagacgtataagaatggcattgtgaaatatatagtcttttcttttttttttttttagatggagccttgctctgttgccaggctggaatacagtggtgttatatcggctcactgcaacctctgcctcctgggttcaagcaattcccctgcctcagcctcctgagtagctgggactacaggtgcacaccaccacacctggctaattttttgtattttagtagagacggggtttcaccatgttggccaggatggtctcaatctcctgaccttgtgatccacccgcctcagcctcccaaagtgctgggattacaggcatgagccaccatgcctggcccttttcattgtttattaaccatttgcatatcttttttagtaaaatgcctattcaattcttttctttattttaaaattagattgtgttcttattgaattgtaagaatttttagtatattctagacacaagtcctatatcaatataggattttcagatatttctccctgtctgtggcttatcttttcattttctcaatggtgtcatttcaggcacaaaagttttaaatgctgattaagtttaacttaccaatttttaaaatgggttgtgcttttggtgttgtaactaagaactttattcttaactcaaggttatgaagattttcttcactggtttcttctagaagttttacagttttagctcttacatttagagctacaatccattttagttaatttttatgtatcaaatgaggtgaaaatctaaattcattttcttgcatatgaatattcagttgtccttacaatctcatataaagagtatccttcctcccattgaattaccttggcacctttatcaaaaatcagctgactgtgaatctaagtgttcatttctagtctcctgattttgttccatgatctccatcttcctcctatgacagtagcacactatcttcattactgtagctttatattaagttttgaagttagaagtatacactccccaactttattttctttttcagaaattgttttgtctattttatgtcctttgaatttcaatgtaagttttaggatcagattgtgaatttccaaaagggaaaaaaaccaaaagcctgctgtggttgtgataccatgattatgttgaatctgcagataaattttggtgagaatcaccatcttaataatagtaagccttccaatctatgactgtctccctatttatttggagctttaacttcattcaacaatgtttgttaattttctttttaaaaatctttcttcttttcctcctttcctttccttttctctttctcttctctttctttcatcccactatgttgcccaaactggcctctaacttctggcctcaagcaatcctcccacctcagcctccttaagtgttgggattacaggcatgagccaccgtgcccagccttaattttcagtttacaaactttgtgctactttgtcacatttattccttagcattttattatttttatgctatcgtgaatagtattgttttctcagtttcatttttagaatagtcattgctagtatatagaaatataattattttttatatatttatcttatatgacctaagtacaattatgacttctagttgcttttttgaaattttatgcttacaaaattatataatctgtgaacaagagattttttttacttcttcctttctagttaagatgcctttcatttattttctcctcattttgtttgtcttctccttttttttttttttttttttgagacagagtctcactgtgtcaccaggctggagtgtggtggcacgatctcagctcactgcaacgtccgcctccggggttcaagcgattctcctgcctcagcctcccaagtagccgagactacatgtgtgtgctaccatagccagctaatttttctatttttagtggagacagggtttcgccatgttggccaggatggtctcaatctcttgacctcgtgatctgcccgcctcggcttcccaaagtgttgggactacaggcgtcataagtttttgagaacacgtgcaatatttgccacttcttctttcttcttctccttttccttctcctcctcctcctccttcttcttccttcctttctctttctcttttctgtgtctccctcttttgaattcaaccccttaaaaaggtaaaaaccatttttagctggcaggccatacagaaacaggtttcaggctggatttggcctgtcaggtgagtttgccaactcctgcaatagaaaatgtaatgcatagggctagacacagtggcttatgcctgtaatcccagcactttgggaggcttaggctgacctgaggtcaggagttcaagaccagcctggcaaacacggtaaaactctgtctctactaaaaatacaaaaattagctgggcgtagtcttggacgcctgtaatcccagctactcgggaggctaaggcaggagaatcgcttgaaccctggaggcggaggttgcagtgagctgagatcgcaccactgcactccagcttgggtgaaagaaagactccgtttaaaaaaaaaaacaaaaaaacaaaagaaagtgtaatgcatgaagtgaaatgaaaaatagatgctgggaaggatgtctaactgggagatagcttgtgatgtaaatatgtaaatatattatgaatgaccagtgggcaaggcaaaattgcctacacagccctacctatggcccctctgaaaatgttctttcttcagcagaatcgaagccagaaattcaacttagtccctcctgccctctgattttctccagtcagcaagctctcagccaacatgtgtggctgagtcatctctctcagctgttttcaagtttatgggcaggaaatcctctccacctgggaaaacactatccagaagatcagaaacaacagcaggatccattctgctttagtggcaaagcagaatggattcaagagggagaagactccagactcctgtttgggagagtaagcaaaaatggcacttcaaaggcactttccagcccacctgaagaacaacagccagcacagtccaaggaagacaacacagtggtggatatagggtccagccctgaacggagggcagatctagaggaaacagacaaagtattgcatggtttagaagtctcaggatttggagaaatcaaatatgaagagtttgggccaggctttatcaaggagtcaaacctccttagcctccagaagacacaaactggggagacaccttacatgtacactgagtggggagacagctttggcagtatgtcagtcctcatcaaaaacccaaggacacactctgggggaaagccttatgtgtgcagggaatgtgggcgaggctttacgtggaagtcaaacctgatcacacatcagaggacacactcaggggagaaaccttatgtgtgcaaggattgtggacgaggctttacttggaagtcgaacctctttacacatcagcggacacactcagggctcaagccttatgtgtgcaaggaatgtgggcagagctttagcctgaagtcaaacctcattacccaccagagggcgcacactggggagaagccttatgtttgcagggaatgtgggcgtggctttcgccagcattcacacctggtcagacacaagaggacacattcaggagagaagccttacatttgcagggagtgtgagcaaggctttagccagaagtcacacctcatcagacacttaaggacacacacaggagagaagccttatgtatgcacagaatgtgggcgtcactttagctggaaatcaaacctcaaaacacaccagaggacacactcaggggttaaaccttatgtctgcctggagtgcgggcagtgctttagcctgaagtcaaaccttaacaaacaccagaggtcacacacgggggagaagccatttgtatgtacggagtgtgggcgaggctttacccggaaatcaaccctgagcacgcaccagaggacacactcaggggagaagccatttgtatgtgctgagtgtggacgaggctttaatgataagtccaccctcatttcacaccagaggacacattcaggggaaaagccttttatgtgcagggagtgtggcagaaggtttcggcagaagcctaacctgtttaggcacaagagggcacactcaggtgcctttgtgtgcagggagtgtgggcaaggcttttgtgctaagttaactctcattaaacaccagagagcacacgcaggggggaagcctcatgtgtgcagggagtgtgggcaaggctttagccggcagtcacacctcattagacaccagaggacacattcaggagagaagccttatatttgcagaaagtgtggacggggctttagtcggaagtccaaccttatcagacatcagaggacacactcaggatagaaactttatgtgtatagggaatgtggtacagcctttagccaggagtcatacttcatcagacaccagaggacacacacagtgctgtggctttttcagccattgctagataccaaagtggagacattctgtgtgtgattatgcatgagactgtactggtaagacttgtatctccatccacctgaaggagaattgctggctcattttcaggagccctgcccttcctcactgtggatggtgggttgtggaaacccggtcaggtaatgatagtggcaggaggcagtcaaatgcccaggcagataggggtgggtacctggtgaaacccaaccttaaagctgaagacagtcccggctaaatcctcatactgaattgagaacctgtcttcccatttggtgtgctttcctccgattgatcccaacccttcacctattttacgtatacctgccctttcctaattggtttttacactgctgtgcccaccttttgagtggtgcctttgcatacttacaaatcagtcaacgtgtattcccctattctgagcccataaaagacccagactcagctgcagtgaggagagaaatcaccctgctgtgggggttggggaccactccctgcatcccctctccactgagagctgttcttttgctcaataaaattcttttctacccatcctcacccttcaattgtcagtgtatcctcattctttttggactcaggacaagcgctcagaaccactaaacatgggtataagctataatacaggcaggccaagagggcagggcacctccagcagcaggcccagggctaagtgagatccaggcagagggctgtcgctggctgtggaggtcctcagttggcaatgtggctgagaaaattcctgtgtcagtaacttgacggagaaagtacttttaaatgggttgaaattaggaaatgaatactattccagtgtcattttacaggtacactggaacattccttccactgtaccctggatgttacagaaactattgcgggaatgaaggaggaccagagagaccatggggtgagacaggaggatttatttatttatttttttgagacagagtctcgctctgtcacccaggctggagtgcagtggcgcgatctcggctcactgcaggctccgccccccaggttcacgccattcttctgcctcagcctcccgaggagctgggactacaagtgcctgccacctcacccggctaattttttgtatttttagtagagatggggtttcactgtgttagccaggatggtctcgatctcctgacctcatgatccgcccgcctcagcctcccaaagtgctgggattacaggcatgagccaccgcgcccagccgacaggaggatttattgagtgcactcagacccagaggattaacatccaaaaactgggcccagaacaaagacagcatttgacttttatacacacttctcaaagtgggtgggctaacttgaaacaagcttacagtggtgcaaaacgtagtggtgcaaaagccaggatacagaggcagagcaaaggcagttaatcaaattgtgacaggtgtataactcaggattacatatgacccttgcttatgcagcccagatggctgttatctaggcttgctcaaaagagccttgcatgggcttatctcataacctttgctatggtgcccagatggctgcagcccaggcctgcctcaggcatgtcttaaaactttcactgtgctgcttagataaaacagaatacttgaagttaactagttacagaaaacaggaatctataacctcataaaacttgcagagcaaggtacaatcacacggagggaggtgggattcgagggggatctttactttttcttatccttatgttgagggagtgctgggagagtctccagagcacattccttcaagcctttgcttctttgataatgttatcgagacctcgcctgggtccaggctttgcctgctaccgcctttaggatgagtcagcctagtatggaaagcttatttttctctttttaaattttattttcttctttctctaatttctgcctcaagacaacaatactagagcttgtcttttgatgtccatctgtcctaactgggaacaagagacttggaagacaccgtggctgatttactatgtgttccccagaccatgaccccacagagtcagcctcaggggagagtttggggaatggttaattcatggagacagggatagtccatgggtagaagagggttttattatatctaggtgactgcaagtatcctagctctaggttttaggaagaggtccatttttaaaaataactttgcttaagccttttggggttttgtctggtttctgggttgaatccacattgaagatatttttattgactgatgtatttagactagaagtgtattgttgttttatttataaaacacacaatatgcagaaatagaaaatgaaattaatttctattctcctttgaattaccaaacaacatcctacaggtaattcttgagtttaaatatttccaaccattgtaaaatgtaccattcttctggttgggaacatatattttttaatggcagtgttcaacaaattaactttaaatactaggttaggtcccagtttgtttgttttttgttttttttcatggaactagactgaatgattctgaattttatttggaaaataaaatttccaagaatcattaggaaaatatagaaactatatagtaacatgtcttgttcatatataagtttttagaatagctctttagaaccatattttaaaaaacagaaaaacaaacccatccatatatgagcattttgaatgcgataaagcaggatttcaaatcagcgtgaaaatggcaatcgtaagattcagtgtttgtgttgttggctatcaatttagggaaaaaataaatgtagatttatttgtttatccaaaggagttacagttagggcatcactgtccaaaatggtaagagatgttaggatcttaatttttgttcaacatctaagtgagtgagtagagttagaagatctggtaaaaaattatgaagtattatcctaggtggagtacttggcatggctggcttttcccagccctcccccatggcaattcatgggctggctttcatacttcttaacagaaaaatactttgaggccgggtacagtgtctcacacctgtaatcccagcactttgggaggccaaggcaggcagatcacaaggtcaggagtttgaggccagcctggccaatatggtgaaaccccatctctactaaaaatacaaaaattagccaagcgtggtggtgggtacctctagtcccagctactcaggaggctgaggcgggagaatcgcttgaacctgggaggcgggggttactgtgagctgagatcacaccactgcactccagcttgggtaacagagcgagactccatctcaaaaaaaaaaaaaaaaaaactttttgagataaactattttataatagtttaaaaactattgagttttaatcccctagagtcttagaatttaattattctcttccataaaattgtgtcacaaaacgatttcaaagttaaacatgttctttttgtgtttaacttttagaaagaatatcacagctttcaatttatttttattttatttaaagaccagtgtggctgggtgtggtagatcacacctgtaatcccaacattttgggagactggggcgtgtggatcacttgaggccaggagttcgagaccagcctggacaacatggtgaaaccccatctctactaaaaatacagaaattagccaggccgtgatggtgcatggctgtaatacccactactcaggaggagaatcgcttgagcccaggaggcggagattgcagtgagctgagattggccactgcattccagcctgggcgacagagtgagactgtctcaaaaataataataaagaacagtgtgatagtatacagctttcaatttaattcatccatataactaagattttgtcttaaattgttaaaaattcttagcaaaaaatagaacagatgctacctgaagacttaaatatatttaaaaagatacaaaccccaggatatggtttctatggagccacgcaaagagaacaggaattgtaagaaaggggtagaaggctacattctatcctttggcccagccccagccccaaccgtgttgattgttaaactcacattaggccctctgctcagaacctctcaggagagaaaattgaggcagataacctgagctgtccacctgggcctggcctggtactaaaatctgtgtgcaaatttggaacctgattaggaggcaagcaccacaaagtattcagttatgtggcttcttctgagtctggtgttttgatgattttccagtctgtctagaaagccattcactagtgctttatctttcccatcctgagatgacagctctagatgtttaaaaccaacagaaacctgtcccagagtaaccactgtccatcctaccattctcacggtaagtagtagactacactacacaaagaaaattttgaagaacagatggtaaacagtatgagacaatatcacctcaaatccacaagtctgttagggtcaccattaaaatgttcaattttaaaagaggtcatagtaagtttttatttgtttatttatttttaaatttttatttatttttattgagatggagtcgcactctgtcacccaggctggagtgcagtggtgcgatcttggctcaccacaacttccgccttccaggttcaactgattctcctgcctcagcctcctgagtagctagaattacaggtgcataccaccatgcccagctaatttttgtatttttagtagagacagggtttccccatgttggctaggctggtctcgagtcctgacttcaggtgatccacctgcctcggcctcccagagtgctgggattacaggcctgagccaccacgcctgatctaagtaagtttttaaatagctatttcatttaattctaattattatgtaacagtggttatctaagtgtggtcagataatgtttgggggccaggcacagtggctcatgcttgtaatcccagccctttgggaggctgaggcgggcggatcacttggggtcaggagttcgagaccagtctggccaacatgacaaaacctcgtctctactaaaaatacaaaaattagccgggcatggtggcgcacacctgtaaccccagctactcgggggctgaggcaggagagtcacttgaacccgggaggtggaggttgcggtgagccgagattgcaccactgcactccagcctgggcaacagagcaagcaagactctgtctcaaaaaaaaaaaaaaaaaaaaaaaagagacccgaaagaatgaaaaacaaaagtatttcattctggaactagacacagaatgaagacattgtgtgaggacctgagctgctgcagctaccttgcaaccacataaagcaacactgccaatacattgaggactgcagagcaggaggaaggattcttgctacaattggtcacctgctaagccaactgaacttcttgctaagtggggaaataaatatctttactgtataagctactttcagttgagcatataactgtataacttcctattaaaagcatcttaattgaaattcccaaattcgtatctctagtaccaacatttcactgagctccacacacatatatctaaatgcctacttgatatcactcttttgaaatccaacaagcatctgcgacttaacatgatacctcaccacccaccccatcctagataactgccacatactcattttcccctatcttagtaaataacactaccatttttccaggggctcaagacatttaggcattatattgaacttctctctttccctatattcacaaccaagcatcagcaacttctgttagttctacactcaaactgtatcccaatctgacaatttctcattgcctcttccagtgatgaccctaattcaaaccaccatcatcataagaccattggtctccaaaatagtttatacataaatgagcctgtcattgacatgtagagacctgggtcaacagtacagatggaggtccccagccagtccccttctgttcccactgccatccttgtcccacatcgtaagaggtcttctattcccacatgtggacactccagcttgcatatctaagctctgtctagccttaccaaattgctctcatttggccacattttgtggataggcagcacattccacctttggaagacagatcaagggaagggtctttggacacagaggagatacaggctctggaagcaggctggagtccatttgaacaggaaatcctggggatttggatacccagagcatggtctgaaagaaggttgtgagatctttgcaggcatgtttctgcctatggactttcaccaggaaggaaactgcttgactagaggagggccaaagtgtggccttttgtatgtttaataatattaaaatgttaaatatattattttgaccaattgagaaataataataataataaaataggccgggtgcgatggctcatgcctgtaaccccagcacttggggaggccgaggcaggtggatcacaagttcaggagatgaagaccatcctggccaacatggtgaaaccccatccctactaaaaatacaaaaattagctgggcgtggtggcaggtgcctgtaatcccagctcctcaggaggctgaggcaagagaatcgcttgaacccgggaggcggaggttgcagtgagcgccgagattgcctcaataaaagataccacagaccccgcccatggcaggagatgggggtgaaggaacagtaagaccaggagacagtcagatacacatcggatcagtggtatcctcacagtaacagaaacggtcacccccaatgtcagccacagtctctttcatccacaatcactttcacattcagctacccacaatcacgggacgtgatttaaaatacagaagctccctgcactgacaaaatccgccgctcctttcgtcggcaagcataaaggtgtgcagcaacagtcacacacgaaccaccacacccaagcattcaaccagtcagccccgcgcgcagcctggccgctttccccaacacagcagctcaaggtcactggagagcctacgaccgcacacagccctctccggtacctgcccccgtggcgcaggcgcgcagtggagggggccgcggggttctctgggagatgtagttcaacgatgacggccgtggcgcaaagcgttctggggctcgtggttcgcggggtccatggggaacgcggtgtcgctggttcagatctcgcagagctcagagtcctgcatgcctcagtcctcgcctcgctcctcctcgcggaggattctgggaggtgacgtcgcgggtctcggtcgcggggcccgtttgcagagcccgcggcgccgggaggtgagtggggccgggccccgggcgggagcgggaagtcaagggcgggctccgggtggcccggccgcgccagggatgggaacccggcaggagtcgctggggaggccgtgtgtgtttcactgtattaccaactatgtgacaggctgcgggtgtgacagaatgtgatcttgtgtcactgtgtgtgtgtgtttgtgcgcgtgcgcccgcttgtgtgtgactgtaaccatctgtgtctgggggtgaaactgtgaatatgtgtgtttgtgtgtgactgtctctgcaggtgtagctgtgtatgtgtttatgagagactggggtgtgacattgtgtgtttgtgtaaatgcatgtgtgtggttatgtgaccacctgtttctgcggatacaattgcgtttgaatgtgtgtgacagcaagtgtgattgtgcgactatgaccatctgtctccgcaggtatagttttgtatcagtaattgtgacaagatgtgtgacttctgtggtatgctactttgtgtgtgattgtgtgtgattgtttatctctgttggtgtagttgtatgttaccatctatctttgtgcttatgtggctgtgtattgtgtgagattatgggtgtgtttgtgtgactctatacatttgtgattgggtgagaatttgtgtgtatatatgagattgtgggattgatgtatgaagcacagaaatattagaattacccaagttcacacagttaacaagtgacagcaccagaactcaaacccaagcagtttagctctagaggtctcgcttttttttttttttttctcttgagatggagtctcactctattgcccaggctggagtgcaatgatgcgatctcggctcactgcaacctccgcctcccaggttcaagtgattctcctgcctcagcctcccaagtagctgggattacaggcgcgcaccaccacgcccagctagtttttgtatttttagtagagacgaggtttcaccatgtttggccaggctggtctccaactcctgacctcatgatccgcccaccagagcctcccacagtgctgggattacaggcgtgaggcgctgcgccctgctgcagtttttatggacaatttcaagctgcactacactaaggaaataactgctagggactgagttgcctagtgcaaagtagtccagaattagggggtgaaattagggggtgatgtatactgaattctaggtcaaccacagttgtccctttcttttcttttcttttcttttctttttttttttttttttttttttgagacagagtcttgctctgtcctgtaggctagagtgcagtggtgcaatctcggctcacagcaccctctacctcctgggttcaatcaagcctcccacctcagcctcccaagtagctgggactacagacacatgccaccacgcccaactaattcttgtactttttgaggagatggggttttgccatgttgcccaggctggtcttgaattcctagtctcaagtgatttgcccaccttgacctcccaaagtgctgggattactggtgtgagccactgtgcccagcctgtctctatttttacaatgaagaaatgttggctctaagaggacaaggaacttacttcagattgcccagtttgttgttgctttagtattaaaatttggcgatgtttccctcaggctgcatttctgtagagaaataaaggtaacacctgccatctctaaagatgcctctctaaggaatatatggcattgattactcgggttgtgttgaatatttcccattcagacatcgtggcctctcaaaagaggactggttttgaggtcacatttcagttggaccccggactttgagttggttgtttaagcttctggaacctcccttttactaccagtaaagtggagatattaatacctatctttgtagttttgtggagcagtagtagttctgaggattaaatgagataatgacacaatgagataaccatgtgtgacagtctctctatctttgtgctaatacggctgtgtgtgtgagagagagagattatgccaccgattgtgtaaatgtgtatatgtttgtgattgggtgagaattttatgtgtatgtgagatcacgggattatgtcggacctagtctgattgtgaggcacaggaagattaaaattacttgcccaacacagcatgagttaacattgtatatttatattacataaggcacagtaaaatttatttattcatttatctaattttttgagagactacaatggtctggtggtgttctgtcattagaatacacctgtgaaccaaacaaaacctagttctcttggatcttacaatcttgcatgggaagagaaacaataaagaaacaaagcagtatgtaacatgtccagtggtgataaatgctgagaaaaaaataattcagggtaaagaaaaatggagtacctggaacaggggttcccttgaggtagaattttcagggaagtccctctgatgaagggacacctgaatgcagataggaataaagaggagtggcccatgctggtgtctgggagaaggttccagacggaaggaaaagtccacaaccctgaagaaggggtgtacagtgtttgagtaacagtaggaagacatgtgcctggagtgtggcgagtaaggggcggaagggtaggaaattaggtcagaggtgcagccaggggccagatcatgaaccaccttgttggccgtaggacagactttggattttgttgagttcaggctatgcgtccttaatatataagtcaagactttgggagttaagttcagcattggattccaccccgccaccctggccagatcttggaaaaggtgaggctggcccatgtagggagaagaaaggggcagtagtatttttgtgggtcttggaccaaaaacacagggctggcacatcatcatttcttcattaactctcccttctcaggactttgttcttcttcagaagagaaaactgaagaaggaggaatggctgtggggctttgtaaagccatgtcccaggtaagcatgctctttcactttgttttcagacatttgacctcatttttcaggactttgggaccacagggaaaatcacaaatagcccaatgagcaccccttccacttctctctccaccttttgttcatataatccttctacaaaacatttaatatcttttttagtcagtgttatgctcaaatgtgtgatggagcagagctatcctctttagatggatgatgatttgttgagtcggcaatgagtgcaagtgaaataagggatagagtttgattactgagtgatctattaaatagggaggtcaaggatggcctctctgaggaagtgacatttagcaaaacaaaacttcagtgaaagtagcaagtaagttttgtggagatctggggaagagctttaaaagaaggagtacaaagttattatggtgggaacatgtttggtgtattccaggaatagcaatgagtctgtccttggagggaaatgagcactgtgatgtcagaggtatagctgggaaccaaattacgtaggccctttcaagtcatgatctgaactttgaatttggttctaagtgaaggagagccattggaacgtttgtgatctgatttgatttatgccttaaagtgaaaacagatagcaggggagtacaggtggaagcagagaggccagtcaggagactcttttagtaatccagacaggaggtgatagcagcctggatcatggtggtggcattggagctagtgagattctgggtatagactggagatagaaaatgcgatttgatcaaggattcgttgtggcatgtgagaggaagaagtcaggatgcctacagagatttttggctaggcagctacatgaatgggcatcccatttactgagctggaaagacaatgtgaagtgggatggatatcaataattgaattctggatatatttagagaccttttggatatccaaatggaatgctgattatacatctggagttcaggactacagatgtgaatttgggagtccttagtgtattttctttctttctttctttctttctttctttctttctttctttctttctttctttctttctttctttcttttctttctttctttctttctttctttcctttctttcctttctttcttttcttttcttttttttttttgagatggagtgttgctctgtcgctcaggctggagtgcaatggcgcaatctcggctcactgcagcctctgcctcctgggttcaagcgattctcctgcctcagctttccgggtagctgggactataggcacacaccaccacgcccagctaatttttgtatttttagtagagatggatttcacgatgttggccaagatggtcttgatctcctgacctcgtgatctgcctgcctcggcctcccaaagtgctgggattacaggggtgagccagtgtgcccggctgtccttagtgtatttaaaacatgagacaggatgagattatcttgagggcagttttgtggtgaacgtagataggaaagagatcgaaggactggctttaggatgttcaacattcagagccacacaagaagaggaggaaccagcaaaagagactgagaagaactgatgtagaaggaaaaccagaagagtgtgggttctggaagccaagaggagaaagtgtttcaaggatgggatgatcaactgagctaagttcctctgagagggactgaagaagacgaagactgagaactcaccgttggatttggtaacatggaaatattcttgacaagagctacttcatggaatgactgggatgaagacatcattgtggtgggtttaagagagaatggaggccgggtgcggtggcttatggctgtaatcccagtactttgggaggccaagatggcgggaccatcgcctgagcccaggagttcaagaccagttatgtatgcagggcaacacagggagactccatctctaaaaaaatttttaatactaaaatccaaaaacataggcatggcggcagatgcctatagtcccagctgcttgggagactgaggtgggaggatcgcttgagcccaggagtttgaggcagcagggagctatgattcatgtggtacacattacagcctgtgcaacagaaacagagtgagaccctgtcttaaaaaaaaataaaaaataaaaataaaaaggctaggtgcagtggctcatgctcatgcctattatcccagcactttgggaggctaaggcaggtggatgacctgaggtcaggagttcaaggctagcctggccaacatggtgaaaccccatctctactaataatacaaaaatcagccaggtgtggtagcgcatgcctgtaatcccagctactcaggagtctgaggcaggagaatcgcttgaacccaggaggtggaggttgcagtgagccaagatcgcgccattgcactccagcctggggcctgggtgacacgagtgaaactccatctccaaaaaaaaaaaaaaaaaaaaaaaaggcaggaaaaagagaatggaaaacgaggaaggtgagaacaaagacagtgaatttagacttacagtagtgtagccagcaggcacatatgagtactctaaattgtgatacactgtaagtgcaaagtatataccagattttgaagattcagtacaaaaaagagtgtaagaagtctcattaattttttatattgattacatgttgaaatgataacattttagatatgttgggttaaataaaaatgatattttttctatttatttttttcttgtgactactggaaaatttcaaattacatatgtgactcaagtatttctggtggataacactggtctaaacaacttacgggaagagttttgttattaagaggagtagagaaatgggacaatagctaaagggagatcatggaagggaacttatttatttatttatctatgtatttatttgcaagagggaagatattgcatcagtttttttgctgattggaatgatccagtaaagtgagaatagttggtagtaaaagggagagaggcgaaaatgtcttcgtgtgggcaagtggacggactggtctttgaagcctagagttttattcatagtcacagagggcagacagaatatacaggtatgagtacagatacagaagggtaagtacatatggtggctggaggatgaggaagttaaaagtgagatcgggatgagttgatggtggttcgagagagagttatgaaatagttatcaggagaggaggagagtgaatttattagggaagcatagtagagtggttttgcagtgcttttgaggacattctggccatatgcaagaagtactttgtgtcaacatgttttatcaatcagggttctagcaaggcaatcaaaaggcaactatttaaaagatattatcaggacatagagaaactataaaggatcatgctgtactctggggctcataacagcatagctctcttactaaccctagatctttgaatccagagacagagagctgggtggaggggcccctgacaggtgctctgaactttgattgaaagacagagaccacccagggtgggactcccacccagggagggagccaggggaataagtattctgccttacttaccttcctttcatctcttgcttgtggctgaacccaacagaatatgggatgggacaacggagtttattgatacagtcagcctcctaggactcagaaaagagtagaggagcacatggaagttatacaacactatggagttgtgtaaatttttccctagacacattcagccatagccataattccactatgtagaataaccatatttgatatttcttttctttttttttttttgagacggagtcttgctctgtcacccaggctggaagtacagtggcacaatcttggctccctgcagcctcctcccgagttcaagcaattctcctgcctcagcctcccgagtagttgggactacaggcacataccaccatgtccagctaatttttgtatttttagtagagacggagtgtcaccattttggccagactggtctcgaactcctgacttcaggtgatctgcctgccttggcttcccaaagtgctgggattacaggcgtgaaccactgcgcctggcctgatatttcattatttttgattaaaaaaagagaacatactgtacatactggaaccctatcatttttaagcactgaatactctttcttcatatggatattttataggaaacttcaccatttattccctgagtagcaaatatttactgagagtttacaatgtgatcagttttgtaatagatactggatatatatcagcttataaaacaaatctctctcccttcactcagcctacagttcagtgctatagcctaaactctatttttgaacatgtaagttttttccagattttttgcataaccttccaatgaaaattctatctaagttgcttcacatatacctcattatttcttcaggatatgttcctggacgtttctccttacatataaagtctaactttcaggccatacccttttgttaaagcccaattcaaggcctttctcctattctgccccacctgatgtctcaatttggggaatataaaggaatcccccatataagattttctttatacttagcatatgtaacatacaacttagtctttgctgtttcttgttataagctaattttgtgtatatatgtcttttttataaaaatgtaaaattttcaaatggtgagtctgtttctaatatttctcttctcttaaagtatttgacaaacctcagcatgtaattgttctccaataattattttcctcgcatcacttagagctttgaactctggccaaattcatcttttttgctaggaccatataggtgtctgggcacctggtgaacaagaatttttttatttcaggggttggtgaccttcagagatgtggcgctagacttttcccaagaagagtgggaatggctgaagccatctcagaaggatttatacagagatgtcatgttggagaactacaggaacttggtatggcttggtaaggatgtttctcccccataatttaaaaatcttcctctggggtgtttttgcttcctctgttgagaatatctaggacatcttaagacatcttaaaagcacttacttgcctttctacttcctgttcccaggaaatgatttgaaatatatatttgcttaaattttaattaattaatttacttttggcagacattctgaacacatgaagtaatttctttttttttttttttttttgagacagagtcttgctcttgtcgcccaggctggagtgcagtggtgcgatctcagctcactgcaacctccgcctcctggattcaagcgattctgctgcctcagcctcctgagtagcagggattacaggcgcccaccaccacacccagctaatttttgtacttttactagagatggggtttctccatgttggccaagctggtctcgaactcctgacctcagatgatccacccaccttgacctcccaaagtgttgggattacaggcgtgagccaccgcgcccagcatatgaagtaatttcatagagttggaaatgagtagttccctttgccgtagaatggtggtttggaacagcaacatcagcatgtcctgggaatttgttaaaatgcaaattatgaggccccattctagacctacaaaatcagaaactgtgggagtaggctcagtagtctgggttttaataaactctccaaatgatcctgatgtctgttaaagtttgagagccactgtagtttctgatgcagtagttctgggttgcggcctgagaatgtgcatttctaattagttcctaggtgatggctgcagctgctgtagcactttgagaaccactgtcacggcagaagcttcatcctcctcctcatccatacaagcgtcattccattctctagctcttcctctaatgtccattcttgcctgatgatcaagatattgggtctgcgtcctagacagctgtggcatgttgatttgtttgtctgtatgtctttctgtctcttgctctcatttttcttcccctgtgaacaggactctccatttctaagcccaacatgatctccttactggagcaagggaaggaaccgtggatggtggagagaaagatgtcacagggtcactgtgcaggtgagtgacagatcaccaggcagggaggactattgtaaggtactcaaccaagtagtaagtaggaaactgttttgagcttcaggtgggatgagaactgaaatctccatagtatgtgcttccctagaaacctcaccacaccctggggttttttctttttctttccatcaaattatactctccggtcttccacctataccttgaatctcaatccttctcagctcttcttttccttttatggttagaattgtattacatttctagatttctttttcagagtttttatttttatcagaattatcaaagatatgtacacacagtgtttaaagaatcaagtagtagtattaggttggtgcaaaaataattgcagttttgccaaaaaacgcaattacctttgcaccaaaaagcctatacaaggctttttcccttaaagaaggaattcttgttcccggctccccagtttccctcttcctagagcgatccactttcttttcttttgtagtttattttggtgttcccttcatgtctccaaaaatatgttaatgttgctactcttgattttttttcagggtgagcccttattcggtatcttcttataagaaaataaggagttagcactttcttctcctgaatccaacacataaggcacacacacaaatacacacatttcccatcccctatcttatcaatgtcatcattttgattaagtcactattcagcatttattttattatggccatttagtgctagtcatagctgtgctgtgcatatggcaagttactttttctctactcctttttatttttcctggagttaataatgacttgggaattttgtttgtttgtttgtttgtttttgctcagtttatatatacataaccctaatccagttcccgacttaccatcaattgtctgagtctttcaagatacttggacatattaggtgatctatccacttcatcttcttggagaaatctctcctggaatcctcagatacgcttcactctacacaaatggctcattatatttgcatgcactcaatttggatctatctgatttatctgatattttctcataattagattgaggtagtgcatttttgcaaagaatgtcacagaaataatgttgtatctctctcagtgcatcattccaaaggatgtataatatcgatatgtcttattatcggtgatgttaactttgcacacttagtgaaggtagtgtctgcttggtttctccattataaagttcttatttttctatttgtagttaataaatatcttgggggagatactttgagattattcagtttcttctgtaatttttgcccatttattttagcatttattgctggatctcttcaactattattactgtggtattaacctaatgttgatttgttccatttccctcttttctttgtgtatattaattgggattgttctgaaggaagagctgctctttctcctccatttacttatatattcaattatatttatggatttttttcctatgaggtaaatctaatttacctcataaaatttaatgacttcataaaatttaaatggatttatttttggatttatggatttttatttctatgaagtaaatccaatgaatcattatgtttctcaaatcgttccagctttgaatgttggaatctccttcacattggttcctttgaccttctgacatgcccccatgcattttttgggcacgtccttccttctggcacaaggtattccaggttctcttattttccttgccccagccttgaatcaaccacttctccaaggagccctcattgctttattgggaaatggtgtttagaaaccaagctaggtatgctctaggctactgggatatcactctttctggccctgacagcagctaaagctaggaaacagatagatagataggtagatagatagatagatagatagatagatagatagatagatagatatttacacacacacccctatatttatttctgcctctttttttcccattttttattacctctatctttttatatactaaaactatcagtttatattaataacttgatttctagtcctgctttacagggtttattgtagccttcctccttgacttatttgtaatttctttttctgataatgagaaaaaatatatttacctatttgttcaattttagtatacacataaagtagtttcagaatttctaacttacttctctgtgagaaacaaatttaccaactagatttaggtatttgtatatagtactttttgttttagtcttatagtgtccagtcaaaatactatttccaaaattacttaggttggttatttcaggtccatttgttactgtttttgtttgagatggagtctcgctctgtcaccaggctggagtgcagtgggcaatctcggctcactgcaagctccgcctcccgggttcaagtgattctcctgcctcagcctcccgggtagctgtgactacaggcgcatgccaccacgcctggctaatttttgtatttttagtagagacagggtttcaccatgttggccaggatggtctcaatctcttgacctcgtgatccgtgccagccttggcctcccaaagtgctgggattacagttatgagccaccatgcccggccgtatatacgtagttttataaggaattgctacattcccctccagaaaagttgtctgcttagtttttttcctgctgtaacaaattagcacacatttagtggcttaatccaacacaaatttattgtagctctggaggtcagaagtaaaaagtaggccttacagagctaaaatcaagatgtcagcagcctatattccttcctaaaactgtatgggagaatgcgtttccttgattttttatgctttttttttgagatggagccttgctctgtcacccaggctggagtgcaatggcacgatcttggctcactgcaacctctgccttccaggtacaagggattttcctgcctcagcctcccgagtagctgggattacaggtgctcaccatcatgcccagataatttttgtaattttagtagagacagggtttcgccatgttggccaggttgatctcaaactcctgacctcaggtgatccacccttcttggcctcccaatgtgctgggattatacaggtgtgagctaccacacccagctgattttttttttttttttgagacagagtttttctcttgttgtccaggctggagtgcagtggcgcaatcttggctcactgcaatctccacctcctgggttcaagcgattctcctgtatcagcctcccaagtagctgggactacaggtgcgtaccaccacacccagttaattgttgtatttttagtagagaccgggtttcaccatattggccaggctggtctcgaactcctgaccttgtgatccacctgcttcggcctcccaaagtgctgggagtacaggcatgagccaccgtgcccagcctattttccactttttaaaataactttaagtgtagggcttatatacaatacagatttgagttttactatataaaccaatctgattttcttttcattttaataagtgaaagtctaattacatttttggtaaatttgggcttaatcctatatattgtcttatgttatattttctgggttttatagtttttaaaaagcactttcaggctgggtgtggtggctcatgcctgtaatcccagcagtctgggaggctgaggtgggtggatcacgaggtcaagaattcaagaccagcctggccaacatggtgcaaccccgtctctactaaaaatacaaaaattagctgggcgtggtggtgtgttcctgtaatcccagctactcagaaggctgaggtaggaaaattgcttgaacctgggaggtggaggtcgcagtgagctgggatcgcgccacggcacttcagcttgggcgacagagcaagactccatctcggaaaaaaattaaaaagtaaaaataaataaattagcctgacatggtgctgtgcacttattattccaactacttaggagactgaggtaggagggtcacttaagcctcggaggtcaaggctgcaatgagctgtgatagtgccactggactccagcctaggctaggtgacagagcaagaccctgtctcaaaaaaaaaaacaaaatgtgtaccttgaagtaaaattgctggaacatggaagtgcatgttttaatttacaagatactcaacttgttctgggaagtgattgtatcagtttatgctcgtactaacaatgacagtgtctgagaatggcatttccttcctctcttgatattcttcaacttaagcttttgatattgtccttaatattgtctaagtgaaatttctgctgatatgaggaagggaaatgctgttatggttttaatttactagtgatattattgagcatctttccaggaatgcattgtctataaagtttttctcttctgtgaattacctgctcatacatttttttgttttgttttttgagacaggttctcactctgttgcccaggctggagtgcagtggcatgatcttggctcactgcagcctatacctacggaactcaagcaatcttctcacctcagcatgcacaccactgcacctggttaatttttttgtttatttttcttgtagagacgaggtctcactgtgttgcccaggctggtctagcactcctgggctcaagcgatcctcccatcttggcatcccaaactgttgggattactggcatacttccacttttggagaattagattatttttctttttcttactgatttgtagtagaactaaattctgggcattattcatttttctatgatatatgttttagttgttttttctcagattgtcccttgccttttgactttgtgttttctcccgcacacaagttttcaaggttaatgtcaaattcattcctttcaaccagatgtcgtcaggatggtagtgaggaggtcatgctccccttcactgtgttctctgtgtcttgcaggtttttaatgctgtaagtgtgtttctcttgatatttttttcatgaccttttccacaatgatagggaattttacaagtcaaccctggttgagttctttcacagagattttggtggaagaaaggtataaaatgcaagggcttaggtcctattattggttttggaatgttctttttttgttcataattttcttttatattattgattacttttgtccaagtttatttaaaataattttcttaagttctgaaataaaatccttatggaattctggttgaaactgatctgatgtaaattaacctgtggtaaaaacatatgcatatattatttttttgctttgttgcaattatatattacatgggttcatttaaatcttccttagaagaatttcgtaacattttgtaggactttttttgtgttcttgccaaccttactcccttctctcttccaattacttacatagcagttgtaatctcaactcactgccttcacctcaggttctcttccactgtcttatcacttgtaatctggcttctgcccttctagtttagctacatccaggtacccttcttcattttcatatccttcagcttattgagatgtataagatagttcttaccactatccattttctcttttcagagctctgttctccctttaatggactctttcccctgtttttctgttgtttcctcgtttaccataagatctttgttgtattaatgtggatctctgtccagttctgtgtagtagaactttcttttctcttcttttccttttttttttttttttttttttgagacagtctagctttgtcacccaggctggaatgctgtggcgtgatcttggctcactgcaacctccacctgccagttcaagcaattctcgtgcctcagccacctgggtagctgggattatagatgtgagccactgcgcccagctaatttttgtattttcagtagagacgaggtttcactgtgttggccaggctggccttgaactcctggcctcaagtgatccaccagcctcggcctcccaaagtgttgggattacaggcgggaacccccatgcttggcctctagtagaaatttctctgatgatggaaataatctatatgtgtgctttctaatacagtagccactagccacatttagctttgagtgcataaaatgtggctagtgtgagtaaggaactgactttttaaaatgttatttaaatttaaattgctgcttatacttagtggctaccgtattggatagcacagctctatacagtcttttaatcaaggggatccaatctgtaagtctatatgtaaagatagtggttggagctccaggcacctcagagtctcccatgttggaaaataactgtagtcttctcccatcaggcttcttttattcagcattaagttagttattgtataaatctgctatttgcctggagtaaagacttatttttggtaagatggagtatagtggcttcaggtgatgcctacaagagatgagatccaggcaagtgagtgagggaacagaagtagttgtatttctagggaaagaatgaatggtatggacctgacaaaggacaggcgaacaaggcctctcaggcctgggtgtagacaagtaagaaaatccaaggcggtatataggacggactggtagggatgaggctttccttgggtgaagggtgtattggaaagaagaaagatacagatgaataatatttccttttcaattttgttctgacctatactggagacagctttacttttcaacagatgagaaactgttatggcaaagactgtatctatttaacccccaaatgccaaaatacgtagttctaaaataatccgtaaccacatctaaacatgaaaatgtctctgtcactgaaatagtcactatattttggaatcctgattatagccttgaacaccaagctcatattctccgagaattattccttaactaagctagtgagttttgatctcttttttcctgacatttatacctgtaataatctatatcatattagcttatccttcattatgtgccatatggaattatcacctgcacaggcttgagctctcagaatttacaaaaggtagaaagaccttgtgtcaggctttcccccctctactaggtacttcagacctactaataggttctatgtatttgaatatattggctgattattgtggtgtgaaaggactttctcattttttgagatcatcttctaaaaaatagttttatttctaccttacccaaccaatatcctctcctgaaagtatcacgtatcttctcaataggcatcattttcccttaatggtgagaaaagctgaccactaggtttcttttagtcactgagaaaaaatatatataaatttttcctggaccctgataaaaatcttagaagttgttgaacagcattagtggaaaaagttgctatgagattaatctggcagcagtcatccatttaacaacatgctgacattgtctgaggcattggatgcaatagtagaagaaaaaggggtgaacatccatccctgccctcatggagctttcagtcttatgaataccagtgcagaatggacaggagggcttaaagactagaggcagggaaactggctgtgatctaatcagacatcctcaactccttatcttgttagcatttagctttgcctgccttttgatgacctgcattttacctgtgtccccaactaccacctccctatcgtcaacacatataccttcccttctcagctctctttattctttgtgcttccattgtcttttgttcatattgcatggccatatttgggagctattagaaccacagactttctaccctccttccccccagttaaattcttccatttcttctctaacaattttcttcctcatagcaaaagaacaaaggagacatttgctttcttgatatttttcagactgggagtcttggtgtgaaattgaggaattatctccaaaatggttcattgatgaagatgaaatatcccaggagatggtaatggaaaggctagcaagtcatggccttgaatgctccagtttcagagaagcctggaaatataagggtgaatttgagctacatcagggaaatgcggagaggcatttcatgcaagtgacagctgttaaggaaatctctactgggaaaagagacaatgaatttagtaattctgggagaagcatacccctgaaatcagtatttttaacacaacagaaagttcctaccatacagcaagtacataaatttgatatttatgataaactcttcccccaaaattcagtcataattgaatataaaagactccatgctgagaaggaatctttgataggtaatgaatgtgaagaattcaaccagagtacgtaccttagtaaagatataggaattcctcctggggagaaaccttatgaaagtcatgatttttcaaagctcttaagtttccactcattatttactcaacatcagaccactcattttggaaaattaccccatggatacgatgaatgtggtgatgcctttagctgttactcattctttactcaacctcagagaattcacagtggagaaaaaccatatgcatgcaatgactgtggaaaagcctttagccacgacttctttctcagtgaacatcaaagaactcatattggggagaaaccttatgaatgtaaggaatgtaacaaagctttcagacagagtgctcaccttgctcaacatcagaggatccacactggagagaaaccgtttgcgtgcaatgaatgtgggaaggcctttagccgttatgccttccttgttgaacatcagagaattcacacaggtgagaaaccatatgaatgtaaagaatgtaataaagccttcagacagagtgctcaccttaatcaacatcagaggattcacactggagagaaaccctatgaatgtaatcagtgtggaaaagccttcagcagacgcatagcccttactctacatcaaagaattcacacaggagagaaacccttcaaatgtagtgaatgtgggaagacctttggctatcgctcacacctgaatcaacatcagagaattcataccggagaaaagccctatgaatgcatcaaatgtgggaagttttttaggactgactcacaacttaatcgacatcatagaattcacactggagagagaccatttgaatgcagtaaatgtgggaaagccttcagtgatgctttagttctaattcaccataagagaagtcatgcaggagagaaaccctatgaatgtaacaaatgtggaaaggccttcagttgtggctcatatcttaatcaacatcaaagaattcatactggagagaaaccctatgaatgtagtgaatgtgggaaggcttttcatcagatcttgtccctaagactacaccagagaattcacgctggagaaaaaccttataaatgtaacgaatgtgggaataattttagctgtgtctcagcccttagacgacatcagagaattcataatagagaaacgctctgattataacaagtataggaaagaaaacatgtggttaccactcaatccttattaaatattagtgagttctttttggttagtaattctttgaatgtagttcatatttcagttcatgagtatccgttatttgaagtagctcagtagtagacatctgttacttttttttttttcagacagagtctcgctctgttgcccaggctggagtgcagtggtgtaatcttggctcactgcagcctctgcctcctgggttcaagcaatcctcctgcctcagcctcctgagtagctgggattacaggtgcctgccaccatacctggctaatttttgtatttttagtagagacggggtttcaccacattggtcaggctgatctcgaactcctgactttaggtgatccacacgcctcagactcccaaagtgctgggattatgggcgtgagccaccgcgcctggccacatctgttactttttgatctgttctatacctggcttagcccaccctcaatgcatatgattcagatgaaactgttaatcagggacagcagtggactggtcacaggctggccaattatttcccccaacctagtgataagggattggcaaatggccctgtctggatcaatgaagtcctttgcgggtattcctatgggcagtaagagaggttttattctggaactgcaagtttcaaggatttaataagattaaaaactcaccagtagcctttttgccactcatgaggaaagctttcccaaagagaaatctaacagaggaaaatggagatgagagacagaaatatgatgatacagcttgatctcctggatccagtcattcctgacagctacaccatcaccatcctttttcattttttgtgatccaataaatttcctttttttgcttaatttggattatatttttgcctcatggaattagagtgctgattcacacattctatgtttgctatacataaaagaaagccttaattttttacgtggcataattatttatcctgaggagcaaccttctgatataacaagtttatgaaagttgaatacacagccttcataaaactgagataattgttacattttatttgtcgataaaactattttagtgtttcttagtttttttcacattatggctgaatattttaaaattcaccaagtaaaattctttaacaggcttccccttaaggagttaaaatcatttgtcacagtgactcaccatttgcctgtaaagagagaatggaaagctaagagaataatactttcatttgtttaatgaatggctcttcatcttcaaggaattacttgattttcttctttcagtatgggtctaaacatattctgtggcagaatataataacaattaaattgtaaatgaggtcttttgtgggtgggctctaaatttggtttaagacccagtgcggtggctcacgcctgtaatccgagcactttgggaggccgaggtgggcagatcacctgaggtcaggagttcgagaccagcctgaccaacatggagaaaccccgtctctactaaaaatacaaaattagccgggtgtggtggtgcgtgcttgtaatcccagctactcaggagggtgaggcaggagaatcacttgaacctgggaagtggaggttacagtgagcgaagatcgcgccattgtactccagcctgggcaacaagagcgaaactccttctcaaaaaaaaaaaaaaaaaaaaaataaataaataaataaataaataaatttggtttaagaagtgtatggataacttctttgcagctagagatatcaaacaaagatattgctggcagaaagaatgagtcatttttaacaaatggtaaaagtaaagcagttaatgcctaaaatttttagagactaaatcatttccattattgggagtaatgaggaagatgaaggtgtagggcaatacgtttcttttttatctgagtggatatagggaaataaactggtgatatggcagctgggccatcttgaatagtgagaaccagtaagaatattgggtattgcctgaagagcatctgtaaaaacatatcagaacaaatgaaagaggaaagaatgaaggatttatatgtgtgcatagagtgaatatatgtgtgcatagagtgaaatattcaacttatacttatttctaataaaatctgaaaattatttttcataaatattcaaattccctttaaacagcttaaaatacagatttagtgactcagtacttcaaaccttgaatagaaacaaatatgattataaaatatttccaaacttatgttacatctaatctgaaacatattaatattataagcttaattcatgtcatcatttctttattttttattatatttcctggaggtataaggatatttatttttataatttccaagcactgagtaataatttatttcagaaagtttcagaaggttacagtaaactttaccaaacttgaagaagaatgactcagatcagtaagaagagtctgagttactcactaattgatttttattttatttatttattttttttgagacagggtctcactctgttatccaggctggaatgcggtgacacaatcatggctcactgcagcctcaacttcccaggctcaagcgaccctcccacctcagcctcctgagtagctgggactacaggtgtgctctaccacacctggctaagtttcgcgtttttctgtagagatggggtttcgcgagttgcccaggctggtctccaactcttggcctgaagtgatttgcccatctcggcttcccaaagtgctgagattatagggatgagtcactgtgcacagctactaattgatttttgatctatgtatggcacctgatttcatcctcgagagtgacgtaaacctaagctactggttcattctctgtttatatagttaaacttcacttgtaatgttgataaaatcttttgtacccatgtgtttagcttcagtgtattttacaatctgatgtttctcctcacaatgaagtactaaattttgtttcttttcaactgtacaacccattgtcttgtgatatattgacctgatctcttaggattagtgaaaatttatgctttattaatatttgattgttattaggaccatctagagatttctgtttatgtgtgtgtatgtgcatctgaagatgtgtattttatttaaattttttgtattaagtgcctactgtgtgccaggctttgttctaatctaagcaatggagatacagcagtgaaccaaacagacaagaattcctgccttcagagagctaatttctaataaggaagacaatgaaaaagatatgtaagtaaaatatataatatgtaagaaagtaaattccaaggtgaaaaagatgaaaaaagggatggggagccagggaaggcccttctgaagttaacttttgagtgaagacctaaaagagaaatatctatctatctgtctatctacctatctctatctatctatctatctatctatctatctatctatctatctatctatctatctatctatctactcatccatccatctatccaaactacatatatatacccacctatagacacatttatatgcctttatagctaatgggaaggaaatctttagtggtatatatacatttacactttatacttactaatttattctcattttatcatgtctacatatttgtgtgttacattttaacacttgactcagatgaattatggccttttacaatctaaacaaatttcacttaattatagtgtatttaatgttggtgcttaattgtcagaatgtagccactggggattaatttaagaaaactccttgctccctccagtacatgaattttggacaaaattgctgccattatgattgagcccgttttagagatcgctggggaaaaaaatgtttcctttttagaacatggtttcatgctgatttctggttctgtctcaatatattttgttataccctactaagattttcaactttattcacaaaactcgagacagggaggtaatagattggatggtggagaaaagtagattgctggaagccatgaggtggcgatacttcactaacagaggaataagtcgccttcctggacagctttcttagacaggtatttacacagcaatttctcacatattctttgagaaagagtagtgaaagtatcagctctttggatattgggacaagtatggactttggagttagacctacatatggatgtcaactctttgtcaggagagcttgaataagtgattcaggctcagtttagtcatctgtaacactggaataataattctagccttttgattttttgtgaggattaattgaaagaatgtaatttgtaaacagttaacaatggggttattattaatgataaaatcaatcacaaagagttggactgtgtccctgaaagccagctactcatgggggacggaattgtgaatttagcccacgtccttcctctacgtacatgggttgagtcccaaacagcagtggccccagcccatctttctgatcctggagtggtacctgcagctctagagtctcccagagctccctctatatatacgtatttcttttcaagacggagttttgctcttgttgcccaggcccgagtgcaatggcacaatctcggctcactgcaacctccccctcctgggttcaagcgattctcctgcctcagcctcccgagtagctgggattacaggtgcctgctaccatgcaaggctaattttttgtctgtgtgtttttagtagagacaaggtttcgccatgttggccaggctggtcttgaactcctgacctcaggtgatccgcccgcctcggcctcccaaagtgctgggattataggcgtgagccaccacgtccggccttgatatttgagactgttaggactctgactttgttctttttttttgagtcagagtctcgctctgtctcccaggctggagtgcagtggtgcgatcttggctcactgcaatctccacctcctgggttcaagcgattctcctgcctcagcctcccgagtagctggtattacagtcacctgccaccatgcctggctaatttttatatttttagcagagacagggtttcactatgttgtccaggttggtctcaaactcctgacctcgggtgatccacccgcctcagcctcccaaaggactgggattacaggcacccagccaggatgctgacttttattaacagaggccaggaaaagaaaaaaataggcatagctcttggttttgttttttttcattttgcatttttttttagacttcatagcacattatcaaaataatttactgtcacactaatttcttgatttgttccccccccatcattcccaattcctattcttcataggcacacacacaggtatgtttgatatacattcttaaatgaatgtgcattcccataatacgaatggtactatgctacaaattcatttttttctagtgagaactgatttttagatttttcatgtttctctgtgcacagtgctctaatgctgttcatcccttctaacatttgtgtagtaattccttgtgtatatttactacattttacttatctattcctgtagtgatggatgcaactcctggctaccacaaagaatattcttgcagactggaactaggttagactatttgcctggcaattgcctagtgggataaagagtttttcgtacactcaatgttaccaggaacaaccagattgctttctagaatggctgcaactgtttacattctcaccagcagcacctctttctacatccttgcaaacactcgttctttaatgtgttcatttgcattattaaggactactggtgaattagagcacatctctgtatacttgccactcacttggacactctatgaagtgtttattcttaccctgtttatcccttatcaaataatttatcaactccattcataaaagttaagatttagttgaaaatccatctggccttgagactttttttttcccctgaaggaatgtctctatatatgacttcagtttattaggtttattcaagtgtattcattttgttaggttatcaacttttcttacaaatagtcctttataatatttttattattttaacttcatgtttcttatttgcatctttttcgttttcttatttgaatctttgctcattttttgaatatcagccttaaaagaggtttatataacttattgatcattgatcttttcaaaaccctgtctcagttttgttatccttttctcttacttttttctaattctctattttattgatttctttatctttataatttcttttttgtttcttttagtgtgctgtgttcctcttattccacacttgtaaattgacaatttgatttttatttttgataaatgtatttaaagctgtaattttcctctaagtactacataagctatgtctcacaattttggcgtttaatgttttcattgttattcattttcacatgttttgtaatttatgtattcttttttaattcaaaaggcttggctatctttttctaatgctattgcaggatagtcagatgtttacatttgttctttggaactgaatgaggcttcgcttactgcctcatatgtgatcaattttcataactgtcactttttaaaattattatttatttatttatttatttttgagatggaatcttgctgtgctacccaggctgcagtgcagtggcacgatctcagcttattgcaacttccacctcccaggttcaagcgattctcctgcctcagcctcccgagtagctgggactacaggcgtacgccaccacacccagctaatttttgtacttttggtagagacggggtttcactatgttggccaggatggtctccatctcttgacctcatgatccacccaccttgtcctcccaaagtgctgggattacaggcgtgagccactgtgcctggcctccatatactttaaaaataaatgtgacagctcgggcatggtggctcacgcctgtaatcccagcactttgggaggacgaggtgggtggatcatgaggtcaagagatcgagaccatcctggccaacatagtaaaaccccgtctctaccaaaagaacaaaaattagctaggtgtggtggtgtgcacgtgtagtcccagctactcgggaggctgaggaggagaatcgcttgaacctgggaggtggaagttgcagtgagccgagactgatccactgcactccagcctgggcgacagagcaaggctccatctctaaataaataaataaagtataggtattacaggcttttggggtgtaaattccccgtctgttagctcaagccaaccaactattggatttttctcaatttgataggtagaacatgatttcccagtgtagttttaatttgtttttttcttattatgaatgagtttgcacttcttttctgtgaactctcatgatatttttgcccaattttcaactggactctagcgtttttcttgtatagcagggaaattagcactttatgtgagttgcaaatattttcttccagtttgctatttgtcttttgaatttgtttatggtccttttgccatgaaaaattgataatattatctaatttgccagtttgttcctttaagtcttcttagttttgattcacgtttaaaaaaaggccctctgcatcttgggtgtgttagttcatttggtgctgctataacagaatacctgagatgagtaatttaaaaggaatataaatttattttctcataagtctggagtctgggacgtccaagatcaggatgctggcatctgatgagggccttcttgttgcatcctcacatggcagaaggcagaaggggcaagaaagcaagagagagctcccttcaacctcaaaccctcttataaggcccctaatcccatccatgaggactttgcccttatgacttaattacctcttaaaggccccacctcttaatactgtaacattggagataagattttaacctatgaattttggaggggacatacacattcaaaccatagcattccacctgtagcaccccccacctcccaaaattttgtttttctcacatgaaaaatacattaattctatcttaatagcccccaaatcttattccagcatcatctcaaaagtctaaggtccagagtctcatccaaatcagatctaggtgagactcaaggcatggtgcattttgagggaaatctacctccagtgtaagcctatgaaatcaaacaagttttgtgctttcaaaatacaatgacatagagtagacattttgattccaaaggagaaataggaaagaagaaagatgtaacaggtctcaatgaagtccaaaacacaaaagggcaaacagtattgaatctttaggcttgagaataatctttgacttcatgtcctactttccacacactagggaagcagttgggctcccaaatccctgagcagccccacccccacagctttgctgagtgcagcccattcttcagctgtcacatgttgaagttgcgtgcttgcaactttcgcaggctggtgatgcacacgggtggctctacagtttggggtcttgaaggctgccccccatctgcatggctccactaggagttgccatagtggcgactctctgtagtggccctgaggctgtccaagatattctttaaaatctaagtggaggaagccatgcctccacagctcttgcgctgcacacctgcagaattagcaccatgtggccattaccaaagctcaccacttgtgccctctggggcagcaacctgagcaacatcctgggccagcttgagccacagcagaggcagcggagtgctgtgctggaatgcagggagcagagacccgaggcagccctgggcagtgagcctcaaggtaccatgggcaccctggcctctctctcaaaaccgttctgccctcaaaaccctgctattctgggcctttggtgggcatggcaacctcagagatctcaaaaatgtctttggggtcatcctcccactattctgatgaacagaacctggcttccgtctagccatgctaatcttactgaatagccacttggccacacccttggttttcatctaaatacccttttttattctttacatggccaagctgaacatttttcaaatctttatattctgcttcacttttaattataaattgtgtcttcaatttttttctcttttctcacattttactaaaagcaattaagagaagccatgcagctccttcaatacttttcttctgccaaatattctacctagttcattgctattaacttcttccttgatagagccctcagggatggacagaattcagccaagtcttttgctattttgtaacaaagatggcctttccttcaatttccaataagatattcctcatttccatcgatacctcatcagaatagcctttatggtccatatttctaccgacattctgttcatgaccacttaaataatctctaatatgtaggctctctctacagctctcgtcttctgagccctcaccagtatcattcttaatgcttcatttatggcaatataggcttttcctagcctgcttctccaaattcttcccgcctctgcccattacacaattccaacgccccttccacatttttaggtatttttaatagtacaccccacttctctattttagtcttttttgcctccttaacagaataccacagactaggtaaataataaagaacagaaatttatttcttacagttctggagtctgggaaattcaatatcaaggtcctggcatctagtgagagccttcttgctccgtcctcacatggcagaaggcaaaaggggtaagaaagcaaaacagagcttcctttaacctcaactcattttctttttttttctttttttgagacagagtcttgctcttgttgcccaggttggagtgcaatggcacgatcttggctcactgcaacttccacttcctgggttcaagcaattctcctgcctcagcctcctgagtagctgggattacaggtgcccaccaccacgccaggctaatttttgtgttttcagtagagatggggttttgccatgttggccaggctggtcccgaactcctgacctcgtgatctgcctgcctcagcctcccaaagtgctgggattccaggcgtgagccaccgtgcccagccaacctcaagtacttttataagggtcctaatcccatacatggcctcacctcttaatattgtcacattagggattaggttttaacctaggaattttggagggaacacaaacattcaaaccatatccctgagataattttaaaattttcccatgatttcctcctgttatgtttttgctttcatttttttcctttaattttttttgtgtgtacaaatccaactttacccctctacagttacctagtttccaatgatcatttacaaataattcaacatttgccacatatttgaaatgtcacctttaacatatacctaattactacatgtatttgggtacattcatgtatttcctattctgttgcaataatttgttcaagtctactgtctgcttgtttcttgagagaagagttttgaaatctctgctataattatgaatttgtccatttctctttttttgttccatcagtttttgcttcatgtattttggagtttttttgactaaatgcataaacgtttgggattgttatgtactgttaattgatcctattgttacaaaatgacattctttgtccctgttaatattcttagctctcaaatctactttgatagtggtatatctactccagcttagtattttttaatttttcagactgggtcttgctctgtcacccaggctcgagcccagtggtgcaatcacagctcactgcagcctcgacctctgggctcaagtgatcctctcacctcacccttcggagtagctggaaccacaggcacacaccaccatgcctggctaattttttgattttttataaagacgaggtctccctgtgttgccaggctggtcttaaactgggctcctgcctcagcctcccaaagtgttaggtttacaggcgtgagccacagcacctggtctacttcagctttttaaaattagcattagcatggtatatctttttctttttttttgttttgcttttaacctatttatattttaatataaccttatttattataatttaaatatgacctttgtaatttaaatataacctttatagttaaaatgggcatcatatagttgggtgtttttttaattcagcctgaagatctctgtttattgggatgtttagaccatttacacattttatataatttattgagtaaaaatcacataatatgaaagtaatcattttaaagtgaacaattcagtggcatttagtacattcacagtgttgtgcaatagccacttctaattccaaaacacttcgatcattccaaaggaaaacctcttaccaattaagcactttctcccccattctccccttcctctattccctagtaaccactaatctgtgttctttctctatggatttatttattttaggtatttcatataaattgaatcatgcaatatgtaaccttttgtatctactttctttagcataatgttttgcagcttcatccatgttgtggcgttatgcatactccattcttttttatggctgaataatattccattgcatgaattaccacactggtaattttgtctatttggtaactttcatctatttggtaacctggtaactttattcatctgttgatggacatctgggttatttccaccttgtggctattgtaaatagtgctgctatgaacatgtgtgtgcatggtcttgtattcagttcttttgggtatatacctaggggtagaattattaagtcatacggtaattcaatgtttagctttctgaggaactgccaaattgttttctacagtggctgaactattttacattcccaccagcaatgtatcagttttccaatatcttcacatcctcactaacacccagtttcctttttttgattattgccattctagtagatgtgaagtggtaccttattgtggttttcatttacatttcactaatgactaataaggtcaaacatcttttcatatgcttactggtcatttgtatatcttctttggctagatgtctactcatgtcttttacccaaagtctaattttgttgtttgtcttttcattgttgagtcataaagagatcttaatatgtattagataatagacctttatcctatacctaatttgcaaatattttcctccatctttaggctatctttttactgtcttcataatgtcctgtgatgcatcacagtttctaatgtttatgaagtgcagtttaacaaatgagatgtgagcaaaagggatgagtgtaatttctggactgcaaccctagaaagcactgtgcctgcttcctctgccctctcctgccctattggctgggagatgctgagagttttaacatccccctttgccccaaagatggatactactcactatggaaggcagagctatcccaccagccctggactgctcagccctagattcttacacgaggtacaaataaatatatggtattcaggtcattgaatatgtattttggggtctttactatatcagcttaacctatactctaattttacaactccagtgtgccatacaaatagtaccattttctggttgtgccatgatgaaggctgggaagcactatgacctggaccatttgttcttggtcccttttgctgacccttccttctcactgccatcaagagggcaatcctttcctccacaccatccaggtaattagcttatagtggtcccaaagataaaggtcgaataccccagctcttgcagaaaatttgagcatatgttggccataggaagccattgccttgccttgggtagcacctgggataaaggttggtgagccctggtgctggaaatccccaaatatggccccttccaggggcccgacacccatgaaagactgtacttgcatcatgggttgtcctgacatagagttccctctcccttcctagctgggagtcaggagttccacctcctccaaagacagacattttcattgttgttccctcaagtcctcacggtcactttctcctgctctggctggcttgggacaaaactgaacctcccagtttatcttccagcctctgagctccgttatgatacagtgagctgccaaaattaaggtgaactgcagatctaacttctttgcttgtcggtccccttggacatgcatcctcagagcgctcctctcccaggaggagcctcccacccctggggcttcctcacagcagcaccttcgagctgaggtggtgggcaggagctccttggaaccctcccttcctccatccgaagagcttgttcctttccacctctgacttcggtgtcctctgctcctcctctcccggcatcgccccttccctgtgcaggggcagcgattggggcctcagccttagttcttccagctggaccctgggatggtgcggggctgtggctctgggaagtatcttggcctgcacgcggtttacatcattgggagcacaggcctcgccctccgaactacgaggcccagagcccttcgcgccgagcgtttcccgcctttcccctgtctcaagtcattgcccagaggccactgcgggccgttcctgcctgtccgtggagctgcggcccccgtgttcccagggtgaacgagcacgtgcgaggcggtggtgcttgtatccgggataaccaggtagggcggctgcatgcttcatagaggccagcctgtgccgaccgggagctgtaggacggtctgtgtctggggctgcttatgggtattcgcgtgcgtctgccggtgcgcggtccgagcctactcacgagagcgtgtgtgtgtcttctgtctcgtgttgctatgaggtttgcatctgtgtggctggaatagcttgtttgtgggggcccgcgcgtgacctgtgtgtgcgttactgtgtgtgtctcaggcaggatagtgacgggccgtgtgactgtgacgccatcatcaggttggtgagatggcgtgaccgcgtgctgcctatcagtctcctgtatgttcctccaccatctatcttgatattcagcctgtgatagtctttggtcagcttccatgcctgggaggcttttttggccagccacgcccggctgttaaattgtgacaaagtggtataaagcactgcttgcacagggtcatggattaaaagggtaacgtctgggccaggcgcggtggctcacgcctgtaatcccatcactttaggaggccgaggcaggcggatcacgaggtcaagagtttgagaccagcatggccaacatgctgaaaccccgtctctactaagaatacaaaaattagccgggcgtggtgtcgggcgcctgtagtcccagctacttgggaggctgaggcaggagaatggcgtgaacccaggaggcggagcttgcagtgagccgagatcgcgccactgcactccagcctgggggacagagcaagactctgtcccggaaaaaaagaaaaaaaaaaggtaacgtcttccaacaagggatgtggtattacttttgctggatcacatgtcttatctacctttttggagataatttgtatgtaagtaacacatacataagtattatttctttttacaataggccaccttgtattatttttaacctctccctcatagcatcactccctctgttcctctcttcctgcagaggtaactactataatggattagaaaagtatccttcccgtatatttccttagaattttagtgcatatatccctaaacaatattttctggatttcattaatgccgaagtgtaaattttaacattcggatatcagaatacatcttacggttgctaaagtgtcgtattttaatgatgtatttcttacttgcacatgaaataatagtgtgtcaataattgataacatcttagcatccttgaaatatagtattactgttttgcctgattttgaaatgtatttaagtattatataatatatattcttctacagcttgctttttaccttcaacatatttgtgcaatttatttgtgcttgatatttatagctttgtttataaaacaatggtaattgttttataaataatctattttcattctcctgttggtagatactacagtgtcgctataacactgctgttaatgtgtgaaagaggttttattggttcatacctagaagtgaattttttgggagttggcggtatagttgtcctcagcctcactaatattgttagttaacattcccactattaatgtatgagttcatttttccatttgattctttccttcaccaatccctattgtcaggtgttttttccaaagactaatttttttagagcaattttaggttcacaacaaaattaggcagaaagtacagagattttccatatgccttcccccaaaacctggatggcctcccccattctcaacacctcccatcagtgtggtatatttgttataactgatgaatctacattgatacattgttatcactcaaagtccatagggttcactgttggtgttgtacagtccatacagcataaacctgtagcatagaagttttggcatgctccctggggcgaaccacaagtcaaagggtgaagtgggagagggaagaaaaaactgaacctgtcataatccctatcactcagtgtttttaagataatcctttccccaaattgtactttcatctacacaaaactatgcagggtcaattcatgagactcaccacttgctctacagtatgatttccaatcttttagtcaaaggaagcacaggtctctgagtctgttgaagagattcaaatcctaaacacaactcagcctggttgtggccctggtcattttaatttttatattctgtctctcttaaatagagacaaggtctctccctctcttttattttatatatatatgtatacatatttttattatactttaagttttagggtacatgtgcacaacgtgcaggtttgttacatatgtatacatgtgccatgttggtgtgctgcacccattaactcatcatttagcattaggtatacctcctaatgctatccctcccctctccccccaccccacaacagtccccggtgtgtgatgttccccttcctgtgtatgttacatatgtatacatgtgccatgttggtgtgctgcacccattaactcatcatttatattaggtatatctcccaatgctatccctcccccatccccccaccccacaacaggccccagtgtgtgatgttcccctgcctgtgtccaagtgttctcgtcgttcaagtctcacctatgagtgagaacatgcagtgtttggttttttgtccttgcgatagtttgctgagaatgatggttttcagcttcatccatgtccctacaaaggacatgaactcatttttaatggctgcatagtattccatggtgtatatgtgccacattttcttaatccagtctatcattgttggacatttgggttgcttccaagtctttgctattgtgagtagtgccgcaataaacatatgtgtgcatgtgtctttataccagcatgatttatattcctttgggtatatacccagtaatgggatggctgggtcaaatggtatttctagttctagatccctgaggaatcgccacactgtcttctacaatggttgaactagtttacagtcccacaaagagtgtaaaagtgttccaatttctctacatcttctccagcacctgttgtttcctgactttttaatgattgccattctaactggtgtgagatgatatctcattgtggttttgatttgcatttctctgatggccagtgatgatgagcattttttcatgtgtctgttcgctgcataaatgtcttctttggagaagtgtctgttcatatcctttgcccactttttgatggggttgtttttttcttgtaaatttgtttgagttcgttgtagattctggatattagccctttgtcagatgagtagattgcaaaaattttctcccattctgtaggttgtctgttcactctggtggtagtttcttttgctgtgcagaagctctttagtttaattagatcccatttgtcaattttggcttttgttgccattgcttgtggtgttttagacatgaagtccttgcccatgcctatgtcctgaatggtattgactaggttttcttctagggtttttatggttttaggtctaacatttaagtctttaatccatcttctccctctcttttaaatagaaacagggtctcactctcttgtccaggctggagcacagtggcatgaccatagctcactgcagcctcgaactcaaagaactcccagcctctactgatccttccacctcagcctcccaagtagctgcaccaccatgtccagctatttttttttttttttaacttgtagagacagggttgtgacttgttgttcaggctggtcttaaactcctgagctcaagcaatcttcccaccttggcctttcaaagtgctgggaatacgagtgtgagccaccgcgctgggactcatttaattttataaagaacatatattctaccaccctattctactgtcagaattttattaaaattacctgtgttcttttcataccatagattagacctaaaatggattcccacttcaccccctactgctgctttgattcctgtttccctgcacatacagtgggccacacctgcaaaaatcacaaggctgacttcaggaatcagttttgatcttcgctgttgtaccttaaaattttttttaacttttattttagattcagggagtacatgtacaggtttgttacatggatatattgcatgatactgaggtttggggtacaaatgatcctgtcacccagatggtgagcatggtacccactaggtagttttttagcccttaccccactccatccctccccccagtagtccccattgtctattgttcccatctttatgtccatgtgtacccatgtagtacccttattaactgtgttgtggagcttacacatgagaaaggcactttcttggattcgtgtacatggctcaagagaaaatggttagaactgatagagaccctgccaggccggtagctcatgcctgtaatcccagcactttgggagggcgaaggcgggttaatcacttgaggtcgggagtttgagaactgatagagaccttaattacctggtcgctgttttttcaactgggattccaggaaggaatctctggttagatcccacagtattcacaactgatccttcctgctgttgactgatgggagcaaagctccacccagattacctatctcaattaggttctttgaaactcaggccacgttagggataaaaacaatggaattctatctgtacaagtgactgttactctagtatagggcaatcccatttctcctttaaatatcatctcttttttaaaaatttttagagttgggggtacatgtgcaggttacctgggtatattgtgtgatgctgaggtctggggtataaatgaccctgccacccacgtactgagcacgatacccactggttactttttcaatccttgcccccttttatgttttcattgactcttatgttttggtctttgaagattgcttaactgattttctcccagaagtcagctttaaaatcccattccagaagcttactgacaatttataaggccagaaaagtaaaaagcaagcatatagattggaaagaacaaaacataactggccccatttgcagatgatattatttctacatagaaaatctaaaggaatttacaaacaagaatatcacacacacacatccagtgaagcagttaagtttaaatctaatacatttaccggagctaaaaattacaaaacaatgattaaaactgatgaactcaaagaagacctacataagacacatactgtgtttatggagtggaaggcttagtatagtaaagacttccattcttccacaatgaaataaaggcttaatgcaatttctatgaaaatttaagcagggcttttgaaaacacagacaggctgatccaaaatttatatggaagagcaaagaaagtggaatagataaataaattttgaaaatgaataataggtcaggtgtggtggctcacgcctgtaattccagcattttgggagaccaaggccagaggattccttgaactcaagagtttgagaccagcctgggcaacatggcaaaaccatctctactcaaaatacaaaaattagctgagtgtgctgacacacacgtctagtctcagctacttggcttggagaatcatctgattctgcagtgagctatgactagaaccattgcactccagcctgggtgacaggagtgagaccctgcctcaaaaaaaaaaaagaaaaagaaaaagtaaaaaaatgagagcaatcagtatacagctatagtaatcaagacagtgtggcattgatagagggatagatgcatagatttttggaaaagagcattcagaaacacagaagtaggccaagcaattcaatggagaaacaatattttttttcaacaaatagcactgtaacaagtagacatccaaaaaatgaaccttgacctaaattttattccttataaaaagttaactcaaaatgtatcatagactaattttcacattcagctttaaaatttttgtgtctgcaataaactgaaaacaaaactatttttagaatgcaagtaactgacaaaggatttgtgtccagaatatattgtaacacacacaaaaaagaaaaaaatccattatgaaaaaactatagagatagagaatagactagtaattgccaggggttagggatggggagtgaggaggacaggaagatgggtgtgactataaatggatagaacaagggacctttgtggtgctgtcagttttatagattgactatggggagtggcagttacactaatctgtgcatgagataaaactgtatagaactgtacagacacatacacaagtgcctataaaactggtaatgtttgtggattgtaccaatgtcaaatttgattctgtactgttatataaggtgttaccattaggagaaacgaggtgtggggtacaaggactaaatagtactatacagcattatctgtataacttcctataaatccataattgtttccaagaaaaacatttttgaagttccagtagaaaaaaacagacttaatatatgaatagactattcacagaaaatgaaattggaggcaacatatttgtttttttgtttgttttttgagatggagtctcactctgttgcccaggctggaatgcagtggcgtgatctcagctcactgcaacctctgcctcctgggttcaagcaattctcgtgcttcagcctcccaagtagctgggataagaggcacacacaaccacacccagctaatttttgtatttttagttgagacggggttacaccatgttggccaggctgctcacaaactcctgacctcaagtgatccacctgcctcagcctcccaaagtgctgggattacaggtgtgagccaccactgcacctggccacgacataaatatttgaaaggcctgaatataaaacatctgtggaacagaatgaagtgaatttttcacatccactgggcccttacctggcatacataaaatcaccagcatctgcatccccatttattgatccagaaacaaagaaaagctttgttgagatatatagaaattgcttctactctaacaccaataactattcttggcttgatatattagaatgtaaactatattttacagtatgcatgaatggtctctttccttcactccaaaaccaacccaaatgaaggtggatttctttccccaaatggatagccaattatcccaataataaaataattgttttgtttctatactcaactagaaaaaaatttgagtttaaaattaaaaattggcctcaaataaatgcgaaaatactgctgattttattattccaattaacatgaagagacagtaaacaaaataataccttgtcaggtatgttttgtgtaaagacaatcttctataaatgttagtatctgatcaagaataaaaatccattttaaaattatttctccaggcccaggtttcccccacccatttgattcttatttttgagaaattaggaaaataaaagcaagaaaaaacaattttaaaaacccatataattaatttggacaaccagatttgtcaccactgtcatatttgctttcactcttttattaaagaaatattacagataaatataacaactcccaccaaacctttcccacatcccaaaaggcaaccaagtcatatatggatccatgaccaatacacagtactgttctttgcaagatcttattaaattatacaaatgttatactgtgttcctttgtgcattttaattttttctctcaatattatatattgtaatctatccatataactataggtagattttgtttctaaattctgtattttatcacagaaatgatcacacttattcatctattccacaattgataaaaatttgttatatccaattttgggcaatacaaaccatgattcaggaacacagtgatatatatctctttgtgtacatttgtgggtgcctgtgaggccaatacaccaaaattcaacagactattccatgtttacatgttttttaaagaaatcttgttaccctaaagtaacggattctactttcatcatagttttaaaattttgctttttatattctggtctttagttggattttatttttgtatatgatataaagtagaaagctaaaatttttctcctatgaaccttccatttattaaataagccattcattccccagtgatttcaatagcactgtcatacacagaattcctgtatcttcttggatttttgtatgaatgctcactatcttactactgcttgatttattcacttggtaatacattgtttaaatgacagcagctttaaataagtacatgatatatctaataatagagtgtgtcttctctacttgctttgtcaagtttgtttcagctatttgtgtttctttacttttccacataaaatttttggataagtttgtgaagttccttaaaataaaactgatgtaaacttcagaagtatattaaacttagtgatttgggagagaaattatatttttacaatgtcaagtcttttcagacaaaatatcatttttcaggtgttcttttgtgcctttcaacatattttataacttgataaagacctaactcattgttgtgtttattcttaggttttctatcaacacattttctaattatttcttgtataaaagttatttttatagttcttcgttgatacttgttttccttacttaatacattggctaggagctcaagtgttgtgttgttatgctgatggaagataccttgtttcagatttcaatgagaatgctgattaaatattatcaataagatgtctgctgaaagtttctggtaacagctttttcattatataatttgtcaccttggaagaattctctaatgtttcataaatttgtggctttttcagaaggctatcccacattcatagttttctactctggaagtgatcatgtaatgtgcaatgaggtgttaattccttcagatggccttgccatattcacaatattcatagggtttctaatgagtatgaattctctggtgtctaacaaggtgcgacttttggctgaaagccttgccacactcaatacagtgatagggcttctcacctgtatgttttctcatatgaagggtaagagatgagatttgagagaaggcttttccacatttactacagtcgaagggtttctcacctgtatgtcctcgtatatgtatagtaagggatgagctttgggagaaggcttttccacatttattacattcatagggtttttcacctgtatggcctctcatgtgcacaataagggaagttctttgagagaaggctttcccacattcattacatacatagggcttctcacctgtgtgacttctcatatgtaaattaagcagtgagcactgagagaaggctttaccacatttatcacattcataaggcttttcccctgtatgacttctcaaatgaagggtaagggatgcaatttgagagaaggctttaccacattcattacaatcataaggtttctctccagtatgaactttttgatgtgtaatgaagttttgcttttggctgaaggctttaccacattcattgcattcatagggtttctctccagaatgaattttttcatgagcaatgagatttgatttctggctaaaggctttcccacattccttacatatatagggtttttccccagtatgaattctctggtgtctaacaagatttgacatctgtataaaagctttcccacattcattacactcataaggtttctctctagtatgaattttctggtgtgtaatgaagtttttcttgtggctgaaggcttttctgcattccttacattcatagggtttctcaccagtgtgacttctcatatgtacagtaagggctgagctttgagagaaggcttttccacactcattacattcatagggtttttcacctgtatgaattctaacatgtataataagcatggaaaactgagagaaggctttaccacatttatcacatttataaggtttttctcctgtatgacttctcatatgaagagcaagggatgcaattcgagggaaggctttaccacattcattacatgcataaggtttctccccagtatgaactttctgatgtgcaatgaggctttgcttctggctgaatgcttttccacactcattacattcataaggtttctctccagtatgaattttttcatgatcaataagatttgatttctggctgaaggacttctcacattccttacatgcatagggcttctctccagtatgaattctttgatgtctaatgagatttgacattttaatgaaagctttaccacattcattacatttgtaagactgctccctactgtgaattttataatgtttaataagtttttccttgtgactgaaggcttttctacagttactacattcatagggcttctctccagtatgaattctcagatgtctgatgaggtccaaagtctgattgaagccttttccacaatgattacacttaaagggggtaatgacaaaatgggatgagctattaccatatgatttcacaggttcattatattcacaatgctcctttctcataaggcatttcacattattatgacagtcaaaattatgttctaaacactttccaaataagtcatactcatagagattgtgtctggaagggaaaaaatcagagttcagaggaaatacatttgcaaatttcttttgacattcattgcctttttcttcagtcagtgttttctggaatttaacttcaacttgtctcaaaagtctgtcctggtttttctgatgctcatcaactccccatatttctcctaaaacagattgcaaataaatatcacttacaaatttttttccaatattgtaatatgaagaacattttgaaaaatatgcaattatgggactgattattggtttaagccctactctcccactattaaaacattttcaactgcatatatctcttatctctgaagttctgagaaggaaattcaggaaaggaaatatgagtagaggcatatatttataaatacaaatagctttgattgctttaaaaaatgatctgatagaaaacaaataggtaaataaataggaaatgcagaatgtacaaatgaagtaagaagaaataatgatagagaaaaaacaaaaacaggaagctaaaaagtataagatcattttgcgggactctattaaaatacatttttataatctaaacacttttctggattgtaaattactaaaactgacactacaagatgcaaaaaacttatctaaaccaatttccataaaatgaaaagaaatatgaaaagtaattccctaaaacaaaaaggaaaaacccagagatccacatgaaaattctaacagattttaaaggacaactcctatgctgtctaaaatgttgtgaaagaaaaaagacaaaaattcctgatgtttttgtgtatgaaacatatattaataccaaaacctgacaaagatgacacaccaaaaaagcaaactatccgatttcatttatgaaaaccattgtaaaaattctatgtaaaacatcaaaatgacccaaaaggaaaaaagtgacccagaagcacattaaatataaaatatatcatatttgagttgagtacattttttccagggatacgtttcgataatagaaagtatattactataaataaattaatgaaaaatgtcaagtaatgacatttgaaaaaatgaaaaaatcaagtaatcatttctgtagatattaagataataaaactcaacatctatttttcatttaaaaatcctttatataaaataggaacaaataacatttaatttgagaataaagtacagtacagcccaaacaccagcactttacttaatggaaaacatccagaagcattcacattaaagtcagaaataagaaaagatgagttgtcaccactcattgcagtactaggtagtacaattaaataagagaaataaatcagaggtatgaaaattaagaggccgggcgcggtggctcatgcctataatcccagcactttgggaggccaaggcgggcggatcgcgaggtcaggagattgagaccatcctggctaacacagtgaaaccccatctctactaaaaatacaaaaaaaaaaaaaaaattagctgggcatggtggcgggcacctctagtctcagctacttgggaggctgaggcaggagaatggcgtgaacctgtgaggtagaggttgcggtgagccaagatcacgccactgcactccagcctgggcgacagagtgagactctgtctcaaaagaaaaaagaaaaagaaaaaaaaaaagaatattaagaaaagagttgcccctcttttcttaattaaaaggcgtgagtgcagtggctcacgcctgtaatcctagcactttgggaggctgaggcaaacagatctcttgagctcaggagttcaagaccagactgagcaacatggcaaaaccccatttctacaaaagatacaaaaattagctgggtgtagtggtgcaagcctatagtcccagctactagggaggctgagatgggaggatcacctaagcctgggaggttaaggttgcagtgagcagagatcaccactgctctctagcctgggggaaagattaagactgtgtgtcaaaacacaaaacaaacaaacaaaaaaacaaaaaaacaaaaaaaaaaaacaggaaaagaaaatgaaaattaacattatttgtcagaaacaaaactgtttacctgaaaaatcaagtcatctgaacaattgtgaaaagtaagaaattcactacatatgaattgatatttatttttaaaaaccttcatatacaaacaactacagtcatccctcattatctattggggactggttccaggacctcccgtggataccaaaatccatggatgctcaatgccttacataaaatgataaaagtattttcttataacttatgtgtatctttctgtatactttaaataatctccagattacttataatactgaatacaatataaatgctatgtaaatcattgttatactataatttaaaatttgtattattttttattgttgtattgttattttttgttgcttttttcccctgaatattttcaatttgtagttgcagaaagcatggatagaaagggctgactatatttagaaattatagaattaaaaactacatttacaatgacaacaaaaagtatgaaaaatatacaaaaataaaaaatgtccaaaaaccatatgaagaaaagtttaaaatgaacacacagacttgaacaaatagaatggtgttatggattgaattgtgttatggattgaactgaagtcctaactcctagtgcctcagaatgaggcttcatttagaaatagggtcattgaagatgaaattagttaagatgaggtcaaactggaataagagaagcccccatgcgatacgactcgtgttcttagaagaagaatgctacatgaagagacaagagacatggaagaaatgccatgtgaagatggagagacagagtagagttatgctgccacaaaccaaggaatgtctggggataccagaagctgaaagaggcaaggaagaatccttccctacaggtttcagagggagtatggccccactgacaccttgattttagatttctggcctccagaactgtgagaatagttattttttttattttttagagacagagtctcactctgtaacccaagctggagtgcagtggtgtgatctaggctcactgcaaccttcgacgctggggttcaaaagattctcctacctcaacctcccaagtagctgggactagaggcgtggttaatttttttgtatttttagtagagatggggtttcaccatgttgccctgggtggtcttaaactcctgagctcagatgatccacccgcctcggcctctcaaagtgctgggattacaggcgtgggccaccacacctggccaattcctgttatttctaagttacccagcttgtggtactttgtttcagcagccctaggaaactaagaaaaaggcattaaagcattttagacaagaaaattcaatggcataaagatgacattcgtaagttaatatatcagtttaaagcggtttcaataaaaatgtttgaaaatagctcaaaggaaaatgatactgggggttgccaccatagaagggaaaaatgtgtaagagaagaattacttttcaacatatatccttttgtactttaaaagttctgttctggccgggtgcgatggcacacgcctgtaatcccagcaggttgaggcatgtggatcatgaagtcaggagttaagagactagcctggccaacatagtgcaacccggtctctactaaaaatacaaaaattagccaggcatggtggcacgtgcctgtagtcccagctactcgggaggctgaggcaggagaatcgcttgaacctgggaggcggaggttgcagtgagccaagatcgcgccactgtactccagcctgggtaacagagtgagactccatctcaaataataataataataataataataataataataaaataaagttctgttctatgagtatgtgtttatatccagtctaaacaaataaaattgttctgaacactgcaataatcaataaaatgagaagaaccaataggaaggttaaaaactggatgacggaattggaacataaaactggagaggcccacctaggttaattgtataggggcaaatatagtgaccatagggaaaagaaatagtaagaagttgaggttaaatatggtataataaatacatgagtttagctcagattctatccaaaagtgcacaaatatggtatcatttaaaaggcataaaccaacgaagacaaagaccataacagacaacaatggatgatagatgtaaacataattttagcagatggaagaagatgaaaggactattatctaacagaagaaccgagaacgctaaaacccatgtgcctgcagacgaagatgtcaaaaagcaagttcctactatataactaaagaaaggctgagaaattagagaagtcatgcaccatgaaaggtgggaatgaacaggggccctaaaaaataacaaaattgaatggaagtctgtaaggcaaacaattgcctgcactgtgcaatgaggtacctatcactcccaagagaagatgggaagactactctctgcttctggagaaatggaaccagatagactctagagtcagggacaccaggcagaagactacagggaacctaaactggctcaaacaaggatatcaagcaaaagtttacgtacttaataaggctgagatgttcagttccctattgctgcttacttccaataggaaaatggaaatttttctcctctctgccagcatctgttattttttgactttttaataatggccattatgactgttgtgagatggtatctcattatggtgatttggatttctctaacaatcagtgatattgaactttctttcataagcttcttggccatatttatgtcttgaaaagtgtctgttcatgtccgtttaatagggctgtttttttcttgtaaatttaagttccttatagatgctggatattaggactgtgtcagatgcatagtttgcaaatattttctcccattctgtaggttgtatgtttactgatagtttacataaatgataatcttgactaaatatattacaacgaatatacaaaaagataataaattaaaatctacaaatcaataattcaaaatagaaacacaggcatacttcagagatactgtgggttcagttccacaccaccacaataaagcatgtcacacaacatttttggtttcccagtgcatataaaagttatgttggctgggtgcggtggctcacgactgtaatcccagcactttgggaggccgaggtgggtgaatcatttgaggtcaggggttcaagaccagcctggccaatatggtgaaaccctgtctctactaaaaattcaaaaaaattagccgggcgtggtggcaggcgcctgtaatcccagctactgggaggctgaggcaggagaatcgtttgaacctgggaggtggaggttgcagtgagccgagatcatgccactgcactccagcctgggtaactaagagagactacgtctcaaaaaaaaaaaatttaatactatatacttagtctattacgtatataacagcatcatgtctaaaaaatgtacaccttaattttaaaatattgcttaaaaatgctaacaatcatctgaaccttcagtgagtcataatctttttgctgataggtgtcttcctcaatctcaatgttgatggctgctgactaatcaaggggggattacagaaagttggggtggctgtagcaatttcttttttcttttctttctttttttttttttttttttttgagacagagtctccctctgtcgcccaggcaagagtgcagaggctagagtgcagtggctcgatctctgctcactgcaacctctgcctcccaggttcaagcgattctcctgcctcagcctcctgagtagctgggattacaggtgtgcgccaccacgccaggctaattttttttgtgtttttagtagagacggggtttcactatgttggccaggctagtctcgaactcctgacctcgtgatctgcccacctcggcctcccaaagtgctcggattacaggtgtgagccactgcgccggccccaatttcttaagataacaatgaagagtcacattgattgacttttctttcacaaaaagtttctctgtggcatgtgatgttgtttgatagtactttacccacagtaggacttctttcaaaactgtagtcactcctctcaaatcctaccactgctttatcaattatatttatggaatattctaaatcattgatttccacaatttgcacagcatcttcaccaggagtagatcctaaagaaatgactttctttgttcacccataagaagtaatccttatccctgcaatcacgagactgcagcaattcagtcacatcttccggctctacttctaattctacttctcttgctagttgcacatctacaattacttcctccactgaagccttgaatccttcaaagtcatccatgagtgtcgaatgaacctctttcaaactcctgttgatattctgatctcctctcctgagtcatgaatattcataatagcacctggaaacataaatcctttccagccagtttttacactttttaatttactttacccagatccatcagaggaatcattacctatggaagctattacattacagaatgtatttcgtaaataataagacttgaaagtcaaaattactgcttgatccatgagctgcagaatggatgttgtattagcaggcatgaaaaccaacactgatctccttgtacatctccattagagctcctgggtgaccaagtgcactgtcaatgagcaatactattttcaaaggaacttttttttctcgtgagcagtaggtatcaacagtgggcttaaaatatttagcaaatcaatgctgtaaacagatgtgctgtcgtccaggctttgttattccatttatagagcacgagcagggtgtatttagcataattcctaagggccctaggattttcagaatgggaaatgaatactggctccaacttaaagtcaccacctgcattagcccataacaggagggtcagtctgtcatttgaaactttgaagccagccactgacttcacctctctagctgtgaaagtcctagatggcatcttcttccaatagaaggctgttgcatctacatcggaacgctattgtttagttagccaccctcatcaataatcttagctagatcttctggataatttactgcagcttccatcggctcttactgctttaccttgtatttttatgttatggagatggctctttccttaaaccttatgaacctacctctgctagcttcaaacttttcttctgcagcttcctcacctctaagccttcatagaattgaagataattaggggcttgtcctggattatgctttggcttaagggaatgctgtggctggtttgatcttctacccagacaactaaaactttctccctatcaacaataaggctattttgctttcttatcatcttatcatttgtgtgtatactgtagtggcacttttttttttttttttttttttttgagacagggtcttgctctgtcacctaggctgggatgcagtagtgtgatctcagctcattgcaacctccacctcttagactcaatcaatcctctcgtctcagcctcccaagcagctgggactacaggcatgcaccattacatccggctaatttctgtatttttagtagagacagggtttcaccatgttgcccagtctggtcttgaactcctgggcccaagcaatccaccggcctcagcctgccaaagtgttaggattacaggcgtgagccaccacacctggccagcactttaaatttacttcaagaacttttcctttgcattcacaacttggcaaacacaaaaggctttgcttttggtctatcttggcttttaacatgctttcttcactaagcttaatcattcctagcttttaatttaaagtgagagatgtgcgactcttcctttcacttgaacacttagaggtcattgtagggttattaattgccctaatttcaatattgttgtgtttcagggaagagagagacccagaaaaagggagagagacgggaatgggtggtcagtagaatagtcagaacacatacaacatttaacatcaattaagtctgccatcttacatggatgaagtttgtggcaccccaaaacaatgacaacagtaacatcaaagatcactgatcacagatccccataacagataataatataatgaaaaggtttgaaatattgcaagaatgtgacacagacacacacagtgagcacatgcttttggaaaaatggtgccaatgggcttgttcgatgcagggctgccacaagccttcaatttataaaaaaatgcaacatttgccaagcacaataaaataaagcataataacatgagatatgcctgtataaatgcatgaggaagaatcattgagaaaacagaaagggtataaaattttaccagcagaaccaaggaaataattggaagagaaaaagaaaaccaccattgaaatgaagaatattatggtgcggggggaatagaactttcaccattagaattacggtacagcaatgtcacactgcaaaacaaggtaatggataagacagacattctgatgcatcactgggtctacaggacatagcacaaacctccaagaatacctctctacccacctatcccacacaaaaaataaacaataggaaaacaagcaactgttagctaaaatcagagaacactacaaataatttcataccaaaacatttgaaaatacagatgaaacaaattttcaaatataatagatgatcctggaatatcaatgtgtggtaactttttacagatacagaggaaattttaatatttatggaagttactttgtcaactctgaaaatttgaagactagaattaagtgggtaatttcatggaaaaatacaacctattatcaaaaactaatgccaaaagacaaaaatatatttacatacacataggatagttataaaaggaaaaatgaaaagagttgtcaaggaaacttccctcagaaatacacaaggtcgaaatagttcaacaggtaacatctaccaaattttctagggagttttaacactaatgctatataaatgctctagagcatgaaggaaagcttccaaattctatttataaaaccagtctaacattgacattaaaaactttaaaagtataaacaattatttaaattcatagcaaacataagaggatgagtcattattgagaaatatctaaacataattgaaccatatacattttaaaaattgtgataatctcctataggaacagattgttttaactacatgaattattttaaaaagtcgaggtggcaaaaaagtacttcaacgaggaataatctctttgggaaaaaaacacaagaaaaacatatgacagatgatgtgccaatcagctcaatatgttaagagttcatacaaattaagaacttgacagaaacaagggcaaaggataccaactgtttattaaaacaaagaaatatagattggaaacatgaaaagatgcttgccttcactcatcataaaggaaatgtaaattcaagctataattagctaccatttttcacctcagtttggcaacgatttttttaaatgctaacagactacactggttgaagttactggtggaaatataaattattacagtctctttggagggcaaaaatgactttataaaattcaaaatacgtgtatatggacatatatatgtatatgtatatatgtatatgtgggtatatatagatgcacacctacattacatacacttgcatatgtacatgacaaatatatcagaaaatgggagctaccaaaaaatcagcactgacttaaaacttttattgaaataaagggtggtagtgattattgaagtatgagagtaaaacctaaaaatacagtgggaagtatgactgtacgacatttcagacatttacaatggaagaaagaagagaaagtaagggactataaatgtcagtaggtttgatttaacaactgcaaattagtgaatgtatgcaaaaagaaaggatcctgtatatgagggtggatggtactcccgaagatgctaataatagaatgaatatcaaagtaagcctggaaacttattaggaaaggttggtatctagcacacaggtaagaaagccaaccagatctctaagttctgaggaaagaaattaagaatggtatctagaaatgacatcttaggtttataaaagagtttgcatcaatggtcacttttgtactacaaaagtgtacatcaggccaggcgcggtggctcacgcctgtaatctcagcactttgggaggctgaggtgggcggatcacttgaggtcaggagttcaagaccagcctggccaacatagtgaaaccccatccctactaaaaataccaaaaagttagccaggcatggtggtgcatgcctatagtcccagctactcgggaggctgaggcatgagaatcgtttgaacccaggagccagaggttgcagtgagccaagattgcaccactgcactccagcctgggtgacagagtgagactctgtctcaaaaaaaaaaaaaaaaaaaaaaaagccgggcatggtggctcatgcctgtaatcccaacactttgggaggccaaggcaggcagatcacgaggtcaggagatcaagaccatcctggctaacatggtgaaaccctgtctttactaaaaatacaaaaaattagcagggtgtggtggcacgtgcctgtagtcccagctatcaggaggctgaggcaggaaaatcacttgaacctgggaggtgggggttgcagtgagccgagatcgcgccactgtactccacagtgacagagtctcactctgtcacacacatacacacacaaaaggtctacatgctttctgaaaatatatatatattttttgagacagggtctcactccgttgcctaggctagagtgcagtgctgtgatcatggcttactgtagcctcaacctcctaggctcaagtgatcctcccacctcagccttccaagcagctgggatcataagcgtatgccaccacacgtggctaatttttttttttttttttttttttgacagagtcttgctctgtcgcccaggctggagtgcagtggcgcaatcttggctcactgcaacctctgcctcccgggttcaagcgattctcctgcctcagcctcccaagtagctgggactacaggcgcgtgtcaccacgccaagctaattttttgtatttttagtagagatggggtttcaccgtgttagccaggatggttgtgatctcctgacctcatgatccgcccacctcggcctcctaaagtgcagggattacaggcgcaagccactgtgccaggcccaatttttcttttctcttttttttttaagagatgaggtctcactatgttgcccaggctggtcccaaactcctggactcaagcaatccttccaccttggcttcccaaagtgctgggactataggtatgaaccactgtgccaacctctgaaaatatctttgaagaatattttagagggatcaaccattcactgattaatcattaataggccctgacctctcctcacctgtctggttcccttccactaaccttgccagtgtctccttaatacttcttcctccatcacccatggttcttcttcttgctccaatttgaaaatcacatcaggtttggtgaacggatagcctgtcaaagggaagttacatagatttgggcatacatactaggaacaaagaaccacccaaaaattgaggctggcccaggaaaaccaggctaaaggacaagaaaatgtggcttcgggggttctgtccccttttgctctgaaaactgcagcatggacattcacatgagcaaaagcatcccaaggccaagctcactctaatatttaaaaggtccatgtatttcagaaacactgggaggaaaaaaaaggtactttctttccagagtttgaattatatagtaaattactcttacctactgtgattaagttgttatagttttctagcatcacattccggtacagttttctctgagcaggatccaatctcttccactcctcctgagtgaagtcgatagccacatctttgaatgttactgttccctgtaacaacacactcccactcaatctgaagtcatccatcttgggtgattgtaaacaaaatatattgaaccttgttctgatattaatcagaggttattaaaaaagcccatcatattagcagcatcctgtcatttatgttcattcactgattagcaagcacatgtctttaatatctaccatgagttaaaggggagattttaggtaccaatttatattgagtgtgaaagaaacataaaaataaaactttaaccaagttaagtggtttgagatctcacaagataccaaaggcaggaaaaaatgaaagcaaggcttagatggaagcagaagcaggggacagaatgataggtgaaatctgtggtatggtgggacatgcaactggagatagccactgatttagcagttggatgtattgttcatgagatcaggagaaatccacattggaaatgaagatttatgggtcatcagcctgtagtatgtgtctgcagccatgaaaatgggatctgattgttcaaatagtttacatgtactggaaaaggggccacagatagaatctcagagacaaccatgaaaaaacacatgccctgatgacaatttgttttttaatggtcagaaatagaattataactgaaactgtgtatttaaaaagctgtagaatggctgggtattacatggctcatgcctgtaatcccagcactttaggagactgagacgtgaaaatcccttgagcccaggagttttgagacgggcctgggcaatgtggcgaaaccgtctgtacaaaaaatacaaaaattagccaggtgtggtggtgtgcatctgtagtcccagctagtcaggaggctgaggtaggaggattgcttgagcccgggaggtggaggttgcagtgagtcgtgattgcaccactacactccagcctgggtggcagagcaaggccctgtctcaaaaaaaaaaagctattgaatgaatttcaaaaaaactggtgaacttcttaaaggcaatgtgatttgaatatagaaatctaatgcactcttcctagttcaaaacagaaatgcccaaacgtatatgaacataagaaaaaatcttaaatagcactcagcctggaaaaaagggagcaatccatatttcctactgtttcaggaatttctaccagaaactaggtgagaaaaaagaaagtctccaatagctcgttcacaatgtatctaagaatttgtttctaggtcctaaaaggaacttatgagcatgaacatccattaacactaagggctcagagaaagctgtggtactgatgggagatcagctcctgaaagcccttcctgctgaaaatcatgatgcttgcaataaacatgttcaagaagcaaaaggcaaagtgtcagaggaaaaaaaccctgaaatccaggggtttttaatatttcccctcatctgggaggaagatccaaataagcctggataaagcatttggtgaggaagtgggactgaggagaaagcatgatgtggaaatctggccctggtataatagtttcaccaattacagggaagaacatgagcacataagaaacacactcttgctgggactacctcagctgcagactttttcctcaggaagttgtattttcttcaggaggtcagatcattaaactagtaaataaattttaaaaatcagcaccaaagattttacaagaaaatcctaattgcccctagctcaagagtgagagaatcccaaaagaaatcattaaaatacatttgaagaaaatacttgggaaaaagaatttagtaaatgcaaaaacagaaacaatttaaagtgaaaaatttagaacttacatatacacaaatctccatatttaaaagctggagctaggcgcggtggctcacgcctgtaattctaccactttgggaagccgaggtgggagaactgcttgaggctagttcaaggccagtctgggcaacatagcaaaacctcatctctacaataaatgaatgaatgaatgaatgaatgaatgaatgccgtgtatggtggtgcgtggctatagtcccagctacttgggaggctgaggtgggaagactgcttaagcctgggagtttgactgcagtgagccatgatctcaccactgcattagagcagcctgggcaatagaacaagaccctgtctcttaaaaaaaaaaaaaaaaaaaaagctgatagtttaagaagaatgaattaggcaaatgtttagtaagtttaaggaagaaaaataaacatcccaaattaggaaaaaacattaaaactaattgatatttaaagtagtatatatctgtggttgaatttttttttttttttttgagatagagtctcgccctgttgcccaggctggagtgcagtgtggcgtgatgttggctctctacaacctccgtctcctggattcaagtgattctcctgcctcagtctcccaaatagctagaactacaggcgtgcgccaccacacccagctaatttttgtattttcagtagagacggtgttcccatgttggccaagctggtctctaactcctaacctcaaatgatctgcctgcctcggcctcccaaagtgctgggattacaggtgtgagccaccacacccagcctgaaatttttaaattcataatgaaatgaataggttaaagggaaacataagcctaagactgatcttaaaaaaaagaagaaaatcccaacagtgcaatactatagcacccactgttattcttctattccaatatttattctgtcttcccaatttctggccaggcacatggtctgctgaaataagtattaatatgtttatatgataatgttctggacagtgagatgaaaggactgcatgcaactgctgataagtgaacataaaggcacgaggtataccatttctcctaagcttctaccttcctgtagactggtaagtcaatgcgacttaccagagtcgagagcaaacagagccatttgagataataaggcagaagccaacaaccaagaatggcagagcaatgaaggagaaagagtttcgttctctgccctttggagctacaggaccagccttgaacttcaatatgagagacaaataaacttatgtcttgtttaagcaaaggttatctgggctttctatcacaggcagtcaagtgtaatactaacagattaatatgttcatgccagatctggccatcctttggcagctatgaagggatggtgctcgaatcctctttaagggaatccactgtgagaagcatagttggcaaacagcctccagctgctccactttcatgctgaggtcatgacaccccaacactgcttccagccacaggctcagcatagtgaggctattaaagtctggactattacacttgatatggttttcctctagtgggaaagctttggtcagcaactcccctttggcctggctgagactttctcacaacttcaggatggtctgagttggcagaaaaaagtattagtaaacttgaagacagatcactaaaaatgatgcaatttgaagaagagacagaaaaaaggatgtagaaaaatgaatacaggctggacacagtggctcacgcctgtaatcccagtgctttgggaggccaaggtgggaggatcacttgaggctaggagttcaagatcagcctgggcaagatgatgagaccctatctctaccaaaaaatttaagaaatcagctaggtgtggtggcacatgcctatagtcctagccactcaggagacattggtgggaggattgatttagcccaagagttcaaggttacagtgagttataattgtgccactgcactccagcctgggtgacagagtgagaccctatctcaaaaaaaaaaaaaagaatatagactcagaaatgtgagctagagcaataagtgcattaacatatgcataatttaagtataagttagagaggagagagaaaaggacagaaaaaatcaaagaaataatggctgaaaacttcccacatttgatgaaaaacattaatgtacatattcaagctcaatgaattccaagtaggataaacgcaacaaggtacacacctaaacacatcatagtcaaaatgttgaaaataaatataaagagaaaatcttgaaaacagcaagggaaaataattcattatcttcaccaaccacaataaaactaatagctgacttctcatcaaacacaatggaggacaaatagcaatgggacaacatattcaaagttctgaaagaaaaaaaaaactatcagagaggaagtagggaaagagggcccaatagaagcctccaccgatcatactccccacaggaacaccaaattgaacaactatccacacaaaaaagcaccttcatcataaccaaaaatcaggtcagcagtcacagtatctggttttaacttcacatcactgaaagaggcactgaggagggtaggaaagacagtcgtgaattgctgatcgtgaattgctaacgccatccctcccctattctccggcagtggccatatggttctgagagagaatctgtgcacccgcaggagggagaccagagtgattgcaggacttttcattggaactcagtggtgccctgtcacagcagaaggcaacaccagggagaacccagttggtgcccacaccagaagtatttggaccagccccagccagtctaggggaattgtccattgtagcagtaggaacctgaattctggcaagcctcaccaccatgggctaaagggctctaggatcctaagtgaacttgaaaggcagtctaggccacaggaattgcaattcctgggcaagtcctggtgctgtgctgggcttggagccagtggactagggggtcatgggacccagtgagacaccagccagggtagccaagggagtgcttgtgccaccctttccctaacccgaggtagtgcagctcgcagctccaggagagaccccttccttccacttgagaagaggagaaggaagagtaaagaggactttgtcttgcaccttggataccagctcagccacagtatgatagggcaccaggcagaggcccccattccatgcgctagctcctggatgcaacttctacacacaccctggaccagaagggaacctgttgccttgagaggaagaactcagtcttcgcagcatttatcacctactgactaaagagcccttgagccctgaacagtcagcagtggtagccaggtagtactcaccatgggccttgggtgagactcagagacatgctggcttcaggtgtgacccagcacatttcccgtgtggtggctacaaggagagactcctgcttgagaaaaggagagggcaaagtatagggaactttggtaccaacttggccacaatggggtacagcaccaagtgggttcttggggtccccaattccaggccttgcctcttgcatggtatttctggacctgccctgggccgaaggggagcttgctgcctgaagggagaatcccaggcctggcaacattcaccacaagctgactgaagagcccttgggcctggaatgaacactggcggtagccaggccatacttgccatgggcctgggtcagtggtagccacggggagaaattcctctgcctgtggaaaggggagggaagagtgggaaggactttgccatgtggcttgggtgccagtccagccaccgtagaataccaagtacattcctaaggtttctgactctaggccctggttcctggatggcatctctggacctgcccgtggctggggggaacttgctactctaaagggaaggaaacaagactggctggctttgccacctgctgactgtagagtgatagggccttcagtgaacacaggtgatagccaggcagtggttactgtgggccttgggtgagactcagtgctgtgctggcttcgtctgacccagcgcagtcccagtggtggtagccacaggggtgcttgtgtcacccctcccctagctccaggcaactcagcacagaaagactctgggagaaagtaagacaacaagagtctctacctggtaatccagagaattcttctggatcttatctaggaccatcaaggtggtacctctatgattctgtaagagccacagtgttaactgggcttggcatgccccctgatgcagatatggttgcagtgaccaaaaacttagatcacaacacccaagtcccttcaaatacctggaaagtcttgccaaaaagggcaggtataaacaagctcagactgctaagactgcaataaatacctaactcttcactgcctagacatcaacaaacattcacaggcattaagaccatctaggaaaacatgacttcaccaaattgaactcagtaccagggaccaatcctggagacacagaaatctgtgacctttcagatagagaattcagaatagctgttttcaggaaactcaatgaaattcaagataacacagagaaagaatttagaatgctatcagataaatttaacaaagagactgaaataattcaaaagaatagagccgaaattctggagctgaaaaatgcaacggacaaactaaagaatgcatcagtctttttttttttttttttttttgagacagagtctctgtaatccaggctggaatgcagtggtgtgatcatggctcactgcagcctcgacctgccaggctcaagtgatcctcctacctcagcctcccaaagagcagggaccacaggtgcatgccaccatacctaactaagtttttaatgtttttgtagagatggtagtctcactacgttgcccaagctggtctcaaactggtctcaaactcctgggctcaagtgatcctcatgctttggcctcccaaaatgctaggattgtaggcatgagccaccacccccagtctgttcagtcactgaacaacagaattgatcaagcagaggaaagaattagtgagcctgaagataggctatttgaaaacacacagtaagaggagacaaaagaaaaatgagtaagaaagaatgaagcatgcctgtaagatctagaaaatagcttcaaatgggcaaatctaacacttattggccttaaagaggaggtagagagacaggggtagaaagtttattcgatgggataacaatagagaacttcccaaacctagagaaagatattgatattcaagtacaagaaggttatagaacaccaagtagatttaaaccaaataagactacttcaagacacttaataatcaaactcctaaaggtcaatgataaagaaaggatccatttaaacacagcaagagaaaagaaacaacataccaatggaagctccaatatgtctggcagcagacttttcagtggaaattttacatgccaggaaagagtggcacgacatatttacagtgctgaaggaaaaaaacttttatgctagaatagtatatctggtgaaaataaccttcaaacatgaaggagaaataaaggctttcccagacaaacaacagctgagagatttcatcaacaccagacctgtcctacaaaaaaatgctaaagagagtccttcaacctgaaaaaaggacgttaatgaacaataagaaatcatgtgaaagtacaaaattcactggtaatagaaagtacacagaaaatgcagaatgttataacactgtaattgtggtgtgtaaactactcatatcttgaatagaaagacgagaagaagggctgggtgcagtggctcacacctgtaatcctaccactttgggaggctgaggtgggcagatcacgaggtcaacagatgagaccattctggccaacactgtgaaacgccatctctactaaaaatacaaaaattagctaggcatggtggcacatgcctgtagtctcagctactcaggaggctgaggcaggagaatcgcttgaacccgggaggcagaggttgcagtgagccgagattgtgccactgcactccagcctggtgacaagagcgagactctgtctcaaaaaaaaaaaaaaaaggaaagatgagaagatgaatcaatataaatacatcaataactaaaacaatgtttcaagacacagtacaataaaatataaataaaaacagcaggttgggcacagtggctcacgcctgtaatcccaaccccttgggaggccgaggcgggcagatcacaaggtcaggagatccagaccatcatggccaacatggtgaaaccctgtctctactaaaaatacaaaaaaattagctgggcgtggagtggcgcaagcctgtagtcccagctactcggtgtcaagcctctgagcccaagctaagccatcatatcccgtgacctgcatgtatacatccagatggcctaaagcaattgaagatccacaaaagaagtgaaaatagccttaactgacgacattccaccattgtgatttgtttctgccccaccctaactgatcaatgtactttgtaatctcccctactcttaagaaggttctttgtaattctccccacccttgagaatgtactttgtgaaatccaccccctgcccgcaaaacattgctcctaactccaccacctatcccaaaacttacaagaactaatgataatcccaccaccctttgctgactctttttggactcagcccgcctgcacccaggtgaaataaacagccttgctgctcacacaaagcctgtttggtggtctcttcacacgtgcgcgtgtgacacttgggaagctgaggcaggagaatcgcttgaacctgggaggcggaggttgcagtgagctgagatcacgccactacgctccagcctggtgacagcgagactccatctcaaaaataaataaataaataaattaaaaagtaaaaacagcaaaaagttaaaaaagcagggggacaaagttaaagtgtagagtactaactttctcttggcctgtttgtttatgcaatcagtgttaatttgtcatcagcttaaagtaatatgttatattatttgcaagcctcatggcaacctcaaatcaaaaaacatacaacagatacataaaaagtaaaatgcaagaaattaaaacataccactagagacaaccaccttcccaaaaaggaagacaggaaggcaggaaaggaggaaaagaagaccacaaaacaacctggaaataacaaaatagcaggactaagtccttacttatcaataataacattgaatgtaaatggactaacatttgaatgtaaagctctccaatcaaaagacagagtggctgaatatattataaaaacaagcaaacaaacaaacaaaaaaacaagacccaaaaatccattgcctacaagaaacacacttcatctataaagacacacatagactgaaaatagatggaaaaatatattcatgcaaatggaaaccaaaaaagagctggactagctatagacaaaatagacttcaagacaaaaactataaaaagagacaaacaaggtcattacatgatgataaaggggtcaattcagcaagaggatataataattgtcaacatgtatgcacccaatgttggagcacccagatacataaagcaaatattattacagtaaaagagagagatagacccaatagaataattgctggagatttcaacattctactttcagcactggacagactatccagatagaaatcaacaaagaactatcagacttaatctgcactacagatcaaatggacataatagatatatacagaccatttcatccaatggctgcagaatgcgcattcttttcctcagcacatagatcactctcaagcatagaccatgttaggccataaaccagtcttaaaacattcaaaaaattaaaattatataagatatcttctctaaccacaatggaataaaactagaaatcaataaggaggaattttggaaactatacaaacacagaaataaaacaacatgctcctgaatgatcactaggtcaatgaagaaattaagaagaaaatttaaaagtttcttgaaataaatgataatggaaacacaacacatcaaagcccatgggatatggcaaaagcagtactaaaaggaaagtttatagctataagcacctacatcaaacaagaagaaaaacttcaaataaacaatttaatgatgcatcttaaaagaactagaaaagagcaaaccaaactcaaaattattagaagaaaataaataataaagatcagagcagaaataaatgaaatgaagaaaatgatacaaaagattaacaaaataaaaaaatcagttttttaaaaaaatgaaatcagcaaacttttagctagactaagaaaaaaagagaagacccaaataagtaaaatcagagatgaaaaaagagacattataaccaatactggagaaattcaaaggatcattagaagctactgtgagcaactatatgccaataaattagaaaacctagaagaaatagataaattcctagaaaatacaacctaccaagattgaaccatgaagaaatccaaaacctgaacagactaatagcaggtaatgagattgaagctgtaataaaaagtctccgagcaaagaaaagctcagaacccaatggcttcactgctgaattttactgaacaattaaagaagaactaataccaatcctaattaaactattccaaataatagaggaagagggaatacttccaaactcattccaggagggcaatattaccctgatacgaaaaccagaccaagacacatcaaaaaaaaaaaaaaaaagaaagctacaggccaatatccttgctgaacattgatgcaaaaatcctcaacaaaatactagcaaactgatttcagcaacacattaaaaagacaatacatcatgaccaagtgggatttatcttagaaatgcaaggacggttaaacatgcgcaaatgaatcaatgtgatatatcagatcaagagaatgaaggacaaaaaccatatgatcatttcaactggtgctgaaaaagcatttgataaaattcaacatcccttccatgataaaaaccctcaaaaactgagtacagaaggaacatacctcaatacaataaaagccatatatgacagactcacagctagtatcataccgaatggggaaaaacagaaagcctttcctttaagatctggaatatgacaagggtgcccactttcaccactgttattcaacatagtactggaaatcctagcaagagaaatcagataagagaaagaagtaaagggcatccaaattaaaaaagaagtcaaattatccttgtttgcatgtgatatgatcttctgtttgaaaaaacctgaagactccagcaaaaaaagtaccagaactgataaacaaattcagtaaagttgcaggatacaaaatcaacatagaaaaatcaatagcatttctatatgccaacagcaaacaatctgacaaaagaaatcaagaaattaatattttcagtagctaaaagtaaaatccctaggagttaaccaaagaattgaaagatctctacaatgaaaattataaagcactgatgaaaaaaattgaagaggacacacacaaaaaaatggaaagatagtccatgctcatgggttggaaggatcaatattgttaaaatgttcatactacctaaagcaatctatagattcaatgcaattgttatcaaaataccaatgacattcttcacagaaataggaaaaaatgctaaaatttatatgcaaccacaaaagacccagaataggcaaagccatcctgagcaaacagaaaaaactggaggagcctgacttcaaattatactacaaaactacagtaaccaaaatagcatggtactgacataaaagtagacacataggccaggaagggtggcttgtgcctgtaatcccagcactttgggaggctgaggtgggagaactgcttgagcctgggagtttgagtcctgggcaacatagtgagaccttgtctctacaaaaaaataaaaaattaggcatggtggtgtgcacctgtggtacttgggaagctgaggcaagaggattacctaagcccaggaggtcaaggctacagcaagccatgttcacacctctgcactccagcctgagcaagagagcaagatcctgtcacaaacagcgacaacaaagaataacaacaagcagacacaaagaccaatggaacagaacagagaacccagaaacaaatccatacatctccagcgaactcattttcaacagcggtgccgagaaatatattggggaaagaacagtgtcttcaataactggatatccatatgcagaaaaatgaaaccagacccctatctcttgccatacacaaaaatcaaatcaaaatggattaaagacttaaatctaagacctcaaactatgaaacgactaaaagaaaacagaggaaattctctaggataatggactgggcaaaggttccttgagtaatatcccgtaagcacaggtagccaaagcaaaaatggacaaatgggatcatatcaagttaaaaagcttctgtacagcaagggaaacaatcaacaaagtgaagaggcaacccacaaaatgggagaaaatatatgtaaactatccatcagacaggggattaataactagaatatataaggagctcaaataactgtatatgaaaaaagtctaataacttgatttaaaaagggggaaagatctgaagacatttctcaaaggacatacaaatggcaaagaggtatatgaaaaggtgttcaacatcactgatcatcagataaatgcaaatcaaaactacagtgagatatcatctcaccccaattaaaatggttttttttgtttgtttgtgatggagtttcgctcttgttgcccaggctggagtgcagtggtgcgatcttggctcactgaaacctccgcctcccgggttcaagcgattctcctgcctcagcctcctgagtagctgggatttgaggtgtgcaccaccatgcctggctcattttcgtattcttagtagagacggggtttcaccatgttgaccaggctggtcttgaactcctgacctcagatgatccacccgccttggcctcccaaagtggtgggattacaggcatgagtcaccatgcccggccttagaatggctttcatccaaaagacaggtactaacaaatactggccaggatgtggagaaaagggaaccctcatacactgttggtgggaatgtaaattagtacaacctgatggaaaacagtttggaagttcatcaaaaaagtaaaatagaactatgatataatccagcaatcccactgctaagtatatacccaaaagaaaggaaatcagtgtattaaagagatatctgtactcccttatttattgcttccttgtttattcacaatagccaagatttggaatcaagctaagtgcccatcaggaaatgcatggataaagaaaatgtgatacatacacaccttggagtactattcagccataaaaaagaagagcctatcatttgcaacaacatggatgcaactggagatcattacgttaagtgaaataagctagacacagaacgacaaagctcacatgttctcacttatttatgagagctaaaaattaaaacaacggaactcatggaaatagagcacagaatgatggttaccagcagctaggaaggatagtgggtgggggaaatggggatggttaatgggtacaaatatagttagaatgaataagatctaatatttgatagtgcaacaggacaactatagtcaacaataatttgtacatttaaaaataaccaaaagagtaaattggattgtttgtaacacaaaggataaatgcttggatagataccctatttaccctgatgtgattattactcattgtatgcctgtatcaaaatacctcatgtacctcataaatgtatacctcatacatgtatacacctactacgtatccacaaaaactaaaaattaaaaaaactaacaacaaagaatcctatatttaggaaacttatctttcaaaaatgaaggtgattatgttaggtgaaagaagccagacacaaaaggtcacatattttattattgtatatatatgaaatattcagaatagataatatagccagaataggtaaatccacagagacagaatgcagaatggtgtttgccaggggctaggagtgagagagggataggggaacagatgcttaatgggtatggggttttattttgaggtgataaaaatgttacagaaccagatagaggtggtggctatacaacactgtgaatgtactaaagaccactgaatcgtagaatgattaattttaaatatgtatgtgaatttcaggtaaaaaaataaggtgaaataagtaaaaacaaagaattcaatgctagcagactagcctcataagaaacacggaaggaagttattcagactgaaaggaagtaacaaaaaacaattaaaatccacatgaaaaaatgaagagctccaataaagcactaagcagaatgcagagcacacaatgataagtatatatcagctgaactaatttcattttcttaggtactctgccctacatttctggagaagtgaaccttttatttgtagatgaagacttaatatggcaacaaaagaacaaataaatgtgatatccttcctctatgggctaattttcttctttatcaatgcgctttatcaccaagaatatcttgagaccttccatggccttattttatactaccttggcctctactcagcactcactggctccaaacacgtttaaccagtatactagttttgaagtacattttaatctatgtttccttatgcctcatacattttctccacttaactttattgaaaaaggaaagacagaggagaagatgaaaggggaaaatcctctccttcctcttacaggcctggaatagaggaaacaaaggccttgaaggtagggaggtaatatgtgcctagaactccccacactctaaggcatgagtgtgaaatgcaagagaagcagtgagttaagtgggaaaagtgtcatgtcaaactgagagaataacttctaagtagctttcagttcccatgtagcacagaccctgagtaggatgaagtagggtcatttcagaaggcaaggtgaggctgggcatagtggctcatgcctgtaatcccaacactttgggaggccgagaggcaggaggattgcctgagcccaggagttcgagatcagcctgggcaacatagtgggaccttgtctctacaaattgtttttttaaattagccaggcatgggggcacgtgcctgtactcccagctacttgggtagctgaaggcgggaggattgcttgagcccagcaggcagaggttgcagcgagctgagattgtgccacgccagcctgggtgacagagtaagaccctgtttcaaaaaaaaaaaaagaaggcaagatgctcctacatgcatgctgtggggtttaggggacccaggaagcatctagagaatgacagattcagagagatctacagagatagcaagaaccaaaggaggccagttgataaagagaggtccttggaccatcactgagctgtgaaatacaccataaattcatcagccactgaatgtcctgaaaaaggagctagctaaatcatccagcatatacccaagctatgaagatcttccctgttatctcaaacaccactttaacagagaacagggatacaaagtagaatctgaatgactaaataattgtcaagagaacaatttgctgattgaactaagttttgaatcagactgcattaaaattagttttttcattttatcaatcagaactcacaggggatagcagagtgagtttagaaacactctgggcctcttggagcttagattctactttggggacagggaaatgaaaacataagcaagtgaataagtgagataaaatgtgatattgataagttaagaaaatgcaataaaggtaatgggttatggaatgaatcagaaactctactttgaatttagtaaccaaagacaaccttgaggaagatgacatttcagcagaaacctgaatgatgagaaagaaccagtcatataaatatctagggtaggaacatttaaaagcatgttcagagttcttggggcaagacaaagttggtctgctcaaagcggggaaaggttagtgagggtgaaacacagtgaatgagggagaatgtagcacaagataatggtgaagacatgggcagaaggcataccaagaggggctttgtaagggacgttattccacatgtaaaggaaagacactagatggtattaagcagagaagtcataataaaaccttaggtttaaattatcactttggttgttctatggagaatggactatagatggtcaggagtggatacagggagattagtaggcagttgccagagtagttccaggtaagaaatgaagtgacatggattataagatccatggaaatgttgatcagagaatataataatattcagcaatgagattaactgaactacaactagatgcaccaatttaacatggatgaatctcacaaacataatattaaacaaaagccagacacagaatacacagattatataaagttaaaagacaggaagaaacaatttatggtgataaaagttgaacactcctggggtgggggtgatgactaggaagtatagaaaaggtatcctagagtgctagggtaattctgtatttcttcactgagtgtgtgcgctgtgttacacaggtatgttcattttgaaaattaactgagtgtgcctgaggaagaaactggagatatatagaagctggcagataaaaatacatggtcggccgggtgctgaggctcacgcctgtaatcccagcctttgtgaggcgggcagataacccgaggtcaggagttggagaccagcctggccaacagggtgaaaccctgtctctactaaaaacacaaaattagctgggcatggtggcgcacgcctgtaatcccacctactcgggaggctgaggcaggagaattgcttgaacctgggaggcagaggttgcagtgagccaagatcgcatcactgcactccaccctgggcaaaaagtgagactccaaaacacaaaaaacaaacaaaaaaaaccacggtcaaagaaaggtatatctcagaagagcaaagctttgagctgagggtaaaaagtaaaatatgttcagtatctgagagtgtaggataaatctgaaagaaaaccacaagtattcacagaatatcaagtgtactaggtgatcttctaggtactggagatacagcagtaaacaaagtaaaacacactctctgcttacattctagtggttaaaattttaagaatttaccagaaatgattacagtgtggctcaatcagcagcaaatgcccattgaaaaagataattacatagggtcatctgaaagacacacatcccacctctttcttaagatagtctagttttctctctttaaatttacgggccgggcgcagtggctcacacctataatcccagcactgtgggaggtcaaggcaggtggatcacttgaggtcaagagcttgagaccaacctggccaacatggtgaaatcccatctgtactaaaaatacaaaaaaaaaaaaaaaattagccaggcgtgctggtgggtgcctataatcccagctacaatggaggctgaggcaagagaatcacttgaacccgggaggcagaggttgcagtgagctgagatcgtgccattgcactccagcttgggcaacagagcaagactccatctcaaaaaataaataaataagtaaataaataaataaatttatgtatgacatgcatagagtaatgtggtaaaatggactagtcttaagcataaaatctgataaatctgtatacatttatagacatgggtacctaccagtaagtcaaaatacagaacattttcacccctccagatttcttcatgctgtttcacagtaaataccctctcagaggtaaccagtattctgacttctatcacaatacattagttttgcccattttcaactttatatgaatggaaccctatgatatatacttttttgtttctggcttctttcattctatgtttgtgtaatctatccatgttggttgttgcgtgtaacagtcatctgttcttttttattgttaagtagtatttcaccgtgtgaaatactataatttattccttttcctgttaattttcatttgcattgtttctaatgctgggctattttgatagttacactttgttttatccttgatcgaaagagaacatcaaaagagctaggtttatcaactacaagaagtaacactacaatgttttcattgacctaggtatcaatgaaaagcttatttctgttagaaaatgttgattttttattgttacaatgaaaattatgtaacaaatttttgctctggttttctttacctgtaaaaaggaaatttaaatttgaagcccagctttaatctctctgaatgaatttcataaaatacccacattttaactcttccctagttttaatcgttcaactctatttcccctgaaaatatgttttatgtatacagacctttataatttactgtatgaattactgcaatccccttaaattgcattggagagtaaggcaagaaacaaatacactatttaacatttacctgggactcagtcatttcctcttctttctgggaagggatggggcctgcagaagtagagctggggaagagaataaaagtcattaaaataggcctgtctttagtttcagaaacatgcacacacagggtggattaaaggtcaccctgtagtggaatgataattaaatctatcagaaatgccaagaatattcataccacaaaggttcttaataggtgtgaggatgattggaataatcatgcagagcttgggcacagggtggatagaaacaggggtgcgtatgtgggagctctgtatcagagaatacatgtagcatcatgaaagcatatatgcaggaaaattatgaaactgacaaaacacctaaagtattttaaagtattgagacatttaagacagtcataattagcaattaaaaaagaagtagcaatttaaaagaatttaaaaggtgatatatcttgaggaacaaataaaaagtttttatgtgtgagtaatgtgtatcggaggtactgatggtaagagagttaaatccgtacttttccctagccagagcaatcagacaagagaaagaaataaaaggcatccaaattggtaaagaggaagtcatactgttgctgctgctgatgacatgattgtatacctggaaaaccctaaagattcatcccaaaagctcctagaactggcaattgaattcagcagtttcaggacacaaaattaatgtacacaaatcagtagccctgctatatgccaacagcaaccaagctgagaatcaaatcaagaactcagccccttttacaatagctgccaaaaaaaataaaatgcttagcaatgtacttgaccaaggaggtaaaagatctctataaggaaaactacaaaacattgctgaaagaaatcacagataacacaaacaaatggaaacacatcccgtgctcatggatgggtataatcaatattgtgaaaatgaccatattgccaaaagcaatctacaaatttgatgcaattcccatcaaggtaccaccatcattctacacagaactagaaaaaaaaacaatcctaaaaatcatatggaaccaaaaaagagcccacatagccaaagcaagactaagcaaaaagaacaaatctggaggcattacattatctgacttcaaactatattataagaccacagtcaccaaaacagcatggtactggtataaaaacaggcatatagaccaatggaacagaatagaaaacctagaaataaagccaaatacttacagtcaacatatctttgacaaaacaaacaaaaacataaagtggggaaaggaaaccctatttaacaaatggtgctgggataattggcaagccatatgtagaagaatgaaactggggccaggtgtggtggctcacccctgtaatcccattactttgggaggccaaggtgggcggatcacgaggtcaggagattgagaccatcctggctaacacagtgaaaccccgtctctactaaaaatacaaaaaaattatccaggcatggtggcaggtgcctgtaatcccagctacttgggaggctgaggcaggagaatggcgtgaacctgagaggcggaggttgcagtgaaccaatatcacaccactgcactccagcctgggcaacagagcgcgactccatctcaaaaaaaaaaaaaaaaaaaagaatgaaactggatccttatctctcaccttatacaaaaatcaactcaagatggatcaaagacttaaatctaagacctgaaaccataaaaattctaaaagataacattcgaaaaacccttgtagacattggcttaggcaaaaacttcatgaccaagaaccgaaaagcaaacacaacaaaaacaaagataaacagatgggacttaattgaactaaaaagcttctgcacagcaaaataatcagcaaagtaaacaacccacagaatgggagaaaatcttcacaatctatacatccaaaaaaggactaatactcagaatctacaaggaactcaaacaaatcagcaagaaaaaaacaatcccatcaaaaagtgggctaggacatgaatagacaattctcgaaagaagatatacaaatggccaacgaacgtatgaaaaaatactcaacatcactaattattagggaaacgcaaaccataaccaccatatgatacttcactcctgcaagaatagccataatcaaaaaataataaatgttggcatggatgtggtgaaaagggaacacttttatactgtcggtaggaatgtaaactagtacaaccactatggaaaacagtgtgaagattccttaaagaactaaaagtatatctgccatttgatccagcaatcccactcctgggtatttatccagaggaaaagaagtcattacaggaaaaagatacttgcacatgcatgtttatagcagcacaattcgcaattgcaaaaatatggaaccagcctatatataaaaaggaacaaaataaaggcataaaaacagagtgaattttactgtatacaaatagaattcaaccaggatgtgaattctgggaggtggaatctaaaatagaatgtagaatatgacacattaatttaactgtactacagaagaggtttatggtagattctttggcattttctacttaattatgttgtctgcaaatagaaacagttatattccttccttttcaatctttatgtcttttatgtacttttcccttattgcactggctaggaattccagtacaatagtgactattataatagtagtaagagaggacatccttgcattgttcccagtcttagagataaagcattcagtatctcaccattaactgtaatgtagctctaggttttttgaagatgccctttagtaaaggttgttcccttcaattcctagtttgctgaggagttgctttgttttttgttgttaacatgaatgaatgtttgtcaagtgcttttctgcatctactaacagtcatatgtttattctcttattacagtcaactgtagtaattgattttcaaaggatgaactggaaattcatctcatattcccaagatgaaccctattgtgatatacttttttcatattgctagattcaattcacccatattctgttgaggatttttgtttctaactccatgaggaatactagtctgtagttttcttgtaatatctttggctttggtatctgggcaaagctggcctcataaaatcagatgaaaagtcttcctcctcttctatattctggaaaagtttgtatagaatcattagaatttcttccgtagatgtttagtacttcacctgggaaattatctgggtgtggagtttccattttggaaggtttttaatcacaaattcaatttcattaatagatatacaactattcaggttatttcttattgtctgaattttggtagtttatgtctttcaaaaaatttactcattcatccaagttgtcaaattcgcaggtatggagttgtttgcagtattcttttattatccttttcaaatctgtgggggtgagtgtgacaccctatctttcattcctgatattatcagcaatttgtttctttttttcaacttttattgatcttttcaaagaacaagcctttagttcactgatttttctccattatttttggtttcaaattgtcctgaattatgctgtaatctttttttttttttttttttttttttgagacggagtctggccctgtcgcccaggctggagtgcagtgttgtggtctcagctcaccgcaagctccgcctcccgggttcacgcctttctcctgcctcagcctcgcgagtagctgggactaaacgcgcccgcaaccacgcccggctgattttttgtatttttagtagagacggggtttcaccgtgttagccaggatggtctcgatctcctgacctcgtgatccacccacctcagcctcccaaagagccaccgcatccggcctatgctgtaatctttaatatccgtttccttttgtttgctttgagtttagtttgcttgtttcccctctagtttgttaaggcagaagtgtagtaatgatttttctaattatttatatcatgtaatgcaacaaacttccctgtatgcactaatttagctgcttcccacatattttggtgtgctgtatttccattttctttcgaattattttttaatttcctataatgtttcttgactcatggactatttagaagtgtgtttcattttgaaatatttggagattttccagatacctttctgttctttacttctagttttattctgctatgttctgagaacagactttgaatgacttttatgtctttaaaattcttgacatttctattatggccccaaatatgatctatgtaggtgaatgcccatgcgcacttgaggaagacatgtattctgctgttgtttagaatgttctataaatgtcactcacatttgaacaccgaaaaaattgacattcaatacatgaatgttggttgataatgccgttttggagtcttctgtaacctttctgatatcctttcacgctctatcgattcctgaaagagaagttttaagtccccaactataattgtgcgtgtgtctatttctcctttcagttctatcagtttttgcctcgtatatcttgaagctctgttagctgcatacacatttatgattgttgtctcttcttactaaccccttgagcattatgtttcttcatccctgattaaatcccttgttctaaactttgtctaatattaaagttgcttcctcttttttttttttggttagtattttgtggctttttttaatatcatttgcttttaatatacttatttatctttatatttaaaatgggtatcttaggctactccatcttgtagtctggtagttaaaatgggtttcttgtaaaacagcatttagatgaatcttgctcttttattcaatgtgataagctctatctgtaactggtgcattcagaatgatattaaaattgattactgatacagctggattaagatgtaccatcttcttagctgttttctatttgctcctttgttctttttcgctctccttcccccacttttctcctttggtttcgtttaattgcacactttttattattctgttttatctcccacttagtcattgtggatgacattttaatgtactgttggacatggttttctagtattttgttggggatttttgcatctgtgctcaccaggaatactgccctgcagttttcttgtgtctctgtcttgctttggtatcaggttaatgctggcctcatgagtctggaactggtccctcctcctcaatattctgaaagattttgagaaggatttccattaattcatctttaaatgtttggtagaattcaccagtggagctgtatggtccagagctcttccattaggaggtttttgattcctgattcagtttccacactagttataggtctgttcagacattttataatatttcttcatgatctaatcttggtagttcgtatgtttctaggaatttaattttttattctaggttatccagtttgttgatgtataattgttcacagttttttcttaagatcctttttacttctgtggcatcagttgtattgtctcttctttcaattctgatgttatttatttgagtcttctctatttttttcatagtttagctaacggtttgtcagtttatcttttccaaataccaactgttagtttctgtcacttttctatttaatttatttatgctctcgtttcctttatttcctttcttctgctaactttgggcttagtttgctcttctgattctagttccttgagatgtaaagttagttgtttatttgagatctttcttcttttatcaggtaagagcttatccatatgaatttacctctcagttctgcttttgctgcaacttataagttttggtatgttgtgtttttgtttgcctcaaggtattttctaatttcattttttatttctcgtttgacccaatggttattcaagattatgttcatttcaatatacttctggatttcttggttttccttgttatattgatttctagtttcattctactgtggtcagaaaatatatttggtatgatttagatattttaaaattttttaacatttgttttgtgatctaatatatgatgcattatggagaaatgtccatgtgtactggagaagaatatgtattctacagctgttgggtataaagttgtgtagatggccaggcacggtggctcatgcctgtaatcccagcactttgggaggctgaggcaggcagatcacctgaggtcaggagttcgagaccagcctggataacatgttgaaaccctgtctctgctaaaaatacaaaaattagctgggcatggtggtggacacctgtaatctcagctactcgggaggctgaggcaggagaatcacttgaacccgggaggcggaggttgcagtgagccgagatcgtgccactgcactccagcctgggtgacagagcaagaccccatctgaaaaaaaaaaaaaaaaaaaagttctgtatatgtctctcagatccattaggtctacagtgttattcaagtcaaatgtttccttattgatttgtcaggaagttctgtccattattaatggacagaaagtggggtattaaagtctcctattatattgtattgctgtatatttctcccttcaattttgccagtgtttcttttacatattagatgtcctggtgttgggtgcatatatatttataatcattctatcttcccagtgggttgacctattatcattataaaatgtccttccttgtctcttgtgacagttttttacttaaatcctattttatctgacatatgtatagctaccccgctgtcttttggttaccatttgcatggatcatctttttccatcccgcaccttcagcctatgtgtgccgttaagatctgaagtgagctttttgtagacagcatatagttgggtcttgtttatatatccattcagccactctgtttcttgattggggagtttaatgtgcgtttcctgtaattattgctagggaagaatttactattgctattttgttagttgctttatgttagtcttcttccttcatctcttctctcttgcagtctccctttgtgttttgttagttttttgtattgatatgctttgacttctttctcttttgtgtagcctctatgggtaatttctggcatatgtagttagtttggggcttacataaaatatagatgtaacagtctattttgagctggtaacaaacttaagtttaatcacatacaaaaactcttcattttaaattctcctgcccacatttggttataactgtcacaattcacatctattcacagtgtatcttttaacatatttcatatctatttttaatacttttgtcttttaactttcatagtagaattaaaagttatttacccaccaccattatggtaatgcagtattctgtatttacatatatatttacctctatcaatgagtttcatacttttctatactgtctttttgctgtttggtgttttttcatttctatttgaaaactccctttagcattttttataaggcaggtctagtggtgatgctttggtttgggaaagtctttctctcatcatcatttttaaaggatagttttgccaagtatagtattccgggttggcagagatttttttgttattgttgtttgttttgtctgtttgatctttcagctctttgaatatatcattctactctgttctcgcctgcaaagtttctgctgaaaaaaatcccttaatagtcctatagatgttcccttgtatgtgacaagttgcttttctcttgctgctttcaaaattctgtgtttgacttttgacaatttgctataatgcatcttggtatgggtttgtttcattttattttgtgtcctttgtgcttcctgaatctggatgttcgtttccttccccagctttggggagttttcagccattacttttaaaataagctttctggtcctttttctctattttctcctgagattcccataatgcatatattagtctgcttgatggtattctataacccacttaagccttcttcactctttttcattattttttattatcactcccctgactgaattatttctaatggcttgtcttccagtttgctaatcctttcttctgctttatttagtctgatgttgaatccttctagtgaatttttcagccaattctctggagagcccacaaagaaaagatggcgtactggttgcacaaaccaaccccttctctcccctggatgagttagggcatctcttcctgactgtctggtactgtaccaggggcagtatctccagcaacagggtatcctgaatctccctactagcttcactagtcttgtttcatgttctctcaggatgcaacagcctttacaattagtttctgatttctcacaaacagaatttgtctgtgaattgttgctgaattagtattttgggaaggtgaggaagggtccaagtcttcctacaccaccatcttgctgatgtcaccccccactccttcattttgaaggggtatttttgcttggtgtgaaatcctggattgacagtttttctgcactttaaaaatgattctcccttgtcttcttgcttgcatggtctctgataatagatctgctatatgtaattcttattcttgttcctcaatagacaatttttttcttgttatcttcaagattttccttttatttttagtttccagcagtttaaatataatatgtgtagatgtgttttaaaattttgttttggtatttatctctgagcttcttggacctatggtttcgtgtcactaacttggaaaattctcagccatcatttatttaaatacttttcttccatctctgctccaattacccatcaggtccatttcatataagtcatagttatcttaaattcctgttgggttgttgcaatacctatgtcataactaagtcagttatgattattgctttgtctctttgaagtatgttttttctttttcttcttgcctttttatatgcctcataatcttcattgaaggctgtacatcttggatagtacagtagatatgaaggttaagaagtttttacacttaaacatgagtatgtcttttcttctgctaggtttttaacatggggggttatgctggtctattcaatagctggacagggtttgaggtttgtcattgctgtggttacactgagtgtaccccaggcttcaataatatcctctaataatatctgtgtttaaggtaagggttgatttcccatggttgttttctcaatgcatgtttctcccttagttttgggtgttccatttgtgctgctccccagagagaatctctcttgcaggcttcctagctgtactctactattgcttctatttgattcttgttatcttggtgggggttgagtagacggagggatagcattctcttatgatctcactaagcctcagtcttaggcagacaccatatccctaagtcttggggatgtggccttcacaagtgctcttgccgctctgccagctgtagtgctagtcctagagcatattcctcccctactcccagagatattactttttttcaggtccctttcctaaactgcaatagctttctacaagtctcctaaggcaactgtttttgctgctcttcattatgcagtgatagggaagatgggtttgggctgctgttgccctcccccagctaacaccacaaggaaaggcttctcaggattcactcccatcttccctatgagtgcctgttgggattcccagaggaaaagcctacaagagactgcaacccccacctccctaattttgcaagtcccccagtggtttcacactttcattagctgacattcacactttaaaaatttgtttaaaaacttgatagctgtattttcttactggcttatatggtgtctggcagagtccatcccaggtaagtaaagcttgagtcctgtttctctcagctggcatctttctttccccagatttaagattacttggttgccctgtgacctcagttctctgaagggtcctagaaaaattattttgtagtttgtccatttccttgttgtacggtagaagtttgtagtttccttgttgtaatgattgaagcaaagttctttccagctgtttacatccctaaggagaaacccaaagtcccctcattacaataaacttttgagaagtccttcagtttattttgtcatggggctcaaaaataccttgcaaataaagttaggattaggataacagtttaaagtcaagtaaattagctaggatggagtgggagtgggaaagcattacaagcaaagcagtagcaattggtaaggcctcagaaaagacggaattcagtatactggaggaactcaactttaagctaattgaggaaatactttagaaataaattcacaaactaaatgttatattcataacaaatgttatttttctttccactgcaaagaacttacttccagccatatcaatttgtttagtttctggactatcatgcatgattccctcctgaaatgagctctgatacagttaaaatgcttacagcaactgccatatctacataataatatatattttttaacactccacttgcttgaatccacgttttgccaaaaacctaaaactcattgaaagctctacacctggcagcatctctcaaggcagaaattctctagttagcgtgaactaactcacagactggggatatggctctgtggtggacaacagtattttctcccccacccccaactctttcctagtcttctctccactatttccatgtgtccccggattccaggtcctaccacaccactttgcaacacatgtttaaatcacaagggaaaagggccaatgacacatgaaagaaggatataagggctggacccacttatataagggcacccactgatggctggaagaacagcattaaactctgtgggtaccgctctatctgggatctaaagttgccaaagccagttgcaactacaggaatcaaaaatttaatttctcaaaagcttctttactttgttttctctttaatttggttggcatgtttgaaaacatttttattctactctcatactcaaataataatttggctaactgtaggcttctcagaaaaacagtttttccttagaaatttaaagcaatgtgacttcactttgtggctccagtgacttctagtgttgctgtacattgacattctacttctagatcattccaactttttttttcctctgtagaaagtttttggcctttcttctctcttattggtttccgatagttggtgtgggtttttctcattaatcgcactgagcttttggtcagtatatatcacggacatacggtcatttcaatccgtatatttattgttctcttctaggaaattttcttgcacgtttttgttttcattttctctactttctcttacgtataattcctaagaataggatgatctatcccttaaactgatcatctaagtgtcttatattttatctcttaacatttctacttctctcttagggcccgtatgtttgagaaggaagctcccacttatgttagttaaacattaagtcacagagctctccattaagaaaactttttctttagacagggagttgaagcttcataaaacagtttaactgcctcctactttccttccctctagttcactctaaacatacttgtatgtatacattctagaaattttcttccaaaatttattacttttaaaaactcgaggccaggcacagtggctcacacctgtaatcccagcactttgggaggctgaggtgggcggatcacaaggtcaggagttcgagattggcctcgccaacatagtgaaacctcacctctcctaaaaatacaaaaaattagctgggcatggtggcaggcgcctgtaatcctagctactcaggaggctgaggcaggagaatcgcttgaacccaggaggcggaggttgcagtgagtctagatcgcgccattgcactccagcctgggcaacagagggagacaccgtctcaaaaaaaaaaaaacaaaaaacaaaaaacacaaaactcaaactacaaaaatgttggaagatcagtacaaagaatacttctaaaacccttaatctatattcagcattgccacatttttctacctctctttccttctctaaaaacatatacacaaacttcacgttaactctttcagaatgtacctccaaaaactaagaagcctcctacataaacacaatgccattatcacaccaaagatattaaacattcgtacaataaaatatattatctctatacttccctagttgtcgcaacaatatcctttaaaaccaattttaaaataaattgaggatttaatcgagaattctatacttataaaatgcatcttaagtaacactcccctgtttaaacttctttttttccccttgcccaaaatttactggcttatggtaacagagaaactgaggtatgtggaaatatgaaagaaaaagagagtgatggaatgtggaattggtatataatgtttaagaataaacaaaataaccatggaatactatgcaaccataaaaaggataagttcatgtcctttgtagggacatggatgaagctggaaaccatcattctgagcaaactatcgcaaggacagaaaaccaaacaccacatgttctcactcatggatgggaactgaacaatgagaacacttggacacaggatggggaacatcacacactggggcctgtcatggggttgggggaggggggagggatagcattaggagatatacctaatgtgaatgacgagttaatgggtgcagcacacgaacatgggacatgtatacatatgtaacaaacctgcatgttgtgcacatgtaccctagaacttaaagtattaaaaaaaagaataaacaaaataaaactggaaaatcttagatatttttatattctttttttttggagacagagtctcgctctgttgcccaagctggaggagcgcatggctcgctgcaggcttcatctccgagattcaagtgattctcccatctcagcctcccaagtagctgggaccacaggcatgcacaaccatgcctggttaattttgatatttttggtaaagatggggttttgccatgttgcccaggctggtcttgaacacttgggctcaagtgatctgcccaccttggcctcccaaagtgctaggattataggcctgagccaccatgcccagcctgatatttttatattctttatggagtcctttttaaaaagtgtattttattttagattcaaggggtacatgtgcttgtttgttacatgagtattaccttaaattacttcaatgacaacttttataattttgtttctgaatacctcattagcttcatctttcactccttgaaagtaaactccagccatacataattacatacctttcttaaaatatacaaagcattgctccttaacagttactgtatattacgtttccatgcctaaaaactatctcttgattgctgatcatcagttccttcttgcctttgaccaataccttcttgttcttaaagagatcagattaagaacaactttatcatttgattgggatatccgtctatgtagatctatttgtacttctgtatctcatgagcttaaccatcttgtggcatttatcactctgccagtgcacccactgatttatctaagtaggactgtgaaccacttatggcagggactggtcatatggtttgatgtttcatggcccagcacaacctatataagaaaagatgtgcagtaattttgtgcaatgaatttaaaataactatgattaatattttgagtgctctatgagaaagttagaaaaagagatgggtactgtaagcagggaaatgcgaactataagaaagaatcaaaagaaatgctagaaatcaaaaacatattaataaaaacaaagaatgccttcaatggactcatcaacaaactcaacacagtagaggaaacaatcagtgaacctgaaaatagaaacttcaaaagaaacttcccaaactaaaatgcacagaggaaaaagaatgaaaaacaaaagagaacatccaaaccatgggagaacatccaaaccatgggacaatatcaaaacatgtatctattaaacagacatctattttcccaattagaaaaccaaaaggagaaaaaagagaacacagatgaaatattgtaagtaataatgtccatgaatgtttcaaattagtgacacacaccaaaccataggctgaggaagcgcaaagaacactaagcaagataaataccaaaaaaaaccacacgtgtatatcatattgaaactgaaaaaacaacaacaaaaaaaaacaaagaaaagatagtcaaggaacccagagaaaagtaacaccttacctataaaacaacactgataaaaattacagcagacttcttgtcagaaactatataaacaagaagaaagtggtgtgaaatatctaaagcattaaatgaaaaagagccaccaacctagaattctctctatccagggaaattatccttcaaagttgaaggagaaatgaagactttcatttctaacaaaaactaagggaattcatcaccagcagacctaccctgtaagaaatgttaaaaagttatttaggcagaagaaaaacaatataggtcagaaacatggatttacataaagaaaggaagagcaccagagacaaaatcatgaaggtaagataaaatcttttggttcttttattagtaattgatctaaaagataaatgtttgttaaaggctataatgataacaatgtattaggtgattacagcacacggataagtgaaatgaatgacagggacatcacaagtgacataacaacggagaagaagggggaactgggaatactgttgtaaagttcctgcactacatatgaagcagtatagcattttcaaaagtgaatttagattacttaaaaatacacattgaaaactctagggtgacactaaaattttttaaaagaagtataaatgataaagtaaacaggagataaaatgaaataatataaaatgctcaatgaaaaccgtagtaatcagacaaaggaggggagaagagaagaaacaaaacaaagaaataaaaaaattttctatttgcatacgaagcaaatggaaaacagctaggaagatggtagtgagctaggaagatggtagtgtttttttgtttgtttgtttgtttttgagacagagtttcactggagactccagcccaggctggagtgcagtggaacgatcttggctgactgcaatctctgtctcctgggttcaagcaattctcctgcctcagcctcaactgggattacaggcatgcaccactatgcctggctaatttttgtatttttagtagagacagggtttcaccatgttggccaggttggtcctaaactcctgacctcaggtgattcgcctgccttggcctcccaaagtgctgggattacacgcatgagccaccacgcctggccaatggtagatgttaatccaactacaaaaataatcacaccaagtgtaaatggtccaaacacagcaattagaagacagattgtcagagtgcatttaaaaaaaaaaaaacaactatatatgtctataagaaacccactttaacattcaagttacaagtaaagagatgaagctaggcgtggtagcgtgcacctgtagtccaagctatttgcaggggctgaggcagaagtttgcttgaacataggagttcaaagctgcagtgtgccatgactgcatctgtgaatagtcactgcactctagcctgggcaatacagtgataccctgtctcaaaaaaaaaaaaaagtcaagggatgagactggtggcctatccttccctagaaatgaaaaaaacaaacaaaaggcaaaacctgtctgaaccagattttcagaaattctgggagatagtcaaaggttgcacccaagcaaacacttaacaaaaaaatttgagcttcaaaaagaaaataagtgcagtgatttaaaacacatcaaatatgctaaaaatgatgaatatataatggtgataataataaaaacaacccactaggagatgccagggaaccactccaataactcaaaatcatataaagggaaataatccatttattctgccttttctgtacaaactgtacctaagggtgaacaaagagttgacgaggaaaattttttctttaggaaaatattctagctagtaaacgaagtaatgacagaattagaatatcgccattttgtagcccttactgaaataatgggtctagttagtaatcatccatgttttctaaaaccggtatagtggtaagaagaactgttctatttttaaaacatatgaaaaatatcctctttttttttttttttttgacagagtctcactctgtcaggctggagtacaatggcgtgatcttggctcactgcaacttccgcctcctgggttcaagcgattctcctgcctcaggctccagagtagctgggactacaggtgtgcgccatcatgcccagcgaatttttgtatttttagtagagacagggtttcaccatgttggtcaggatggtcttgatctcttgatctcgcaatgtgcccactatggcctcccaaagtgctgggattacaggcatgagccaccatgcccagcccatccttctatgtctcaccttacttcctctaatattacaacccaatagtccttcagccctgtcaggagcttccattccttgattctactaattttttactgtccttcactctcttcctatcctcacttttccacttacctagcctaaaatccacagtcaaaacaacaatcaattattttgccaacttaagactcttcttgcctctctctcacattattcctctttgcttcatgaaaccaacattctggttaaatccaaatctccccctagcctgtctggctgcaactatgcggatgaacactgcaggagaaaaatcacacagctacacagaataggctcactttaaattcataaatactaacattaagtgggtctttgatggtgcctgaaaatcataatttctctattctctgtcccaatctctgtgattttttttcccctgttcttctcaaactctagcacgtcctccaccaatctcactctcatttgagtctcttgctaggtacttcactataaagttaaaacaatcataagagaaggtttacaagttctcaccaacacatctgcccatctacttgtatctgtgcctgggtacttctccctctctcctgttattgccgtggtcaagctccaagctcagccaaactctgccactagatctcatttgctctggctacttaaggacatttttatattatctgctttctctcctgtattgtagtttctctctctaccggatcatttcaatcagtatataaacagaatgtgtacctcttaactccagctaccattccatttcacttcttccatttagaaaaaaaaaaaaaaagtcttcaagagttgtctagacttgatatctccaacgttttcttttccagttctctctttggcctaaaattccacggacactgctttcagggtccctaataaatgaatttcatgttgccaaattccatgcttctttctcactcctcattttatgtggcacccgacacagttcttgttaaaacacattcttcccttggtttccagaatatcacactcacctagttttccttcaacgtttcaagctagtccccatcagtctcttttgctaattcctccttacttcccagagtttgttatgttggagtgactcagagatcagtcatttgcctctacctttctctatctatcctaccctctaagtgacctcattcagtctcgtgttaaataccatttatatgctgataattcccaaatatatgtctccatcctagatcttagatctcccttttgtctctctttttgaatttcatacttgtatatccaactgccaacttgatatctccacttgaatgtctaatgggcattctcacatttcacatactatattccaaactgaaatctcactacattccaagtcagtttttcctacattgttccccttctcagttaatgacacacccattcaagttactcataaaaacagtattgtgtcaccttgtctcattcacactctacctcagtttgtcagcaaatcacagcagctctacctttaaattatatctagtacatgactacttcttagcatttttactactctggtccagatcaccaatatcttttccctaaagtactacaatacagtcatgtgctgcgtaacaatgtttcagccaacaacagatcacatatacaacagtggtcctataagactttaatgaagctaaaaaattcctatcacctagtgacatcatagccatcataacatcgtaacacaatgcattacacacgtaacctaggtttatataagtacactctatgatgtttgtggtgatgctagtgtcaacacccctactgcactgatagtggtataaaagtatagcacatacagttgtgtatggtattagtatttgataatattattgattattgatcatgtgaatagtacataatacttgacaataataataaatgactgttactgctttatgtatttactatactatactttttattgttagagtatatccctacctaagaaaaagtaaactataaattagcctcaagcaggtccttccagacgtattccagaagacattattatcacaggagatgataaccatgcatgtttattgttccatgcatgtttattgcccctgaagaccttccagtggaacaagatgtgaaggtggaagacagtgatattgatgattctgaccctgtgtaagcctaggctaatatgtttgtgtcttagttttcagcaaaggagtttcaaaagttaaaatatttttaatagaaaaaagcttataaagatataaagaaaatctttttatacagctgtacaatatgtgttttaagttaagtattattataaaagagtaaaaaagtttaaaaaatttaaaagttcatgaagtaaaagagttacagtaagctgaggttaatttattactgaaaaaagaaaaatgtttttataaatttagtgtagcctaagtgtacggtgtttatagtcaacagtagagtacactaacgtcctaacccttcatattcactcaccaccacacacacacacaaaatatatatataggtataccaattttaatcgtatttatttatttatttttgagacggagtctcactctgttgcccaggatggagtacagtggcgcaatctcagctcaatgcaagctccgcctcccgggttcaagcaattctcctgcctcagcctcccaagtagctgggactacaggcgtgtgctaccacgcctggctaattttttgtatttttagtagagatggggtttcaccgtgttagccaggatggtctcgatctcctgacctcgtgatccgcccaccttggcctcccaaactgctgggattccaccgcgcctggcccatttttaatctttatatactgcattttcactgtatcttttctgtgtttagatatgtttagatacacaaagtcttactactgtgttacagttgcctatggtagtcagtacagtaacatgctgtacaggtttgtagcctgggaacaataggctgtgccatatagcctaggtttgcaggaggctataccatctaggttgtgtaagtatactccatgatgttcatacaaggacaaaattgtctaaccatgcatttttcagaatgtatccccatcattaagcaacacaattgtagcttcctaattggtctctgtgcttcttcccttgacctccctgctctttcctcattcgtcctcccataggccattctcatcagagcagccaaagctgtcttcttaaattgtaagcagatagtatcacttccatgctcaaaaaccctccagcagcttcccatctcactcagaggaaaagccaaaattaatactacgggccataaagcccaatttgatctgccctcctcccatccacttacctttcttctcttctctcccactactctccccttcaattattctattttagcctcttcattaacaggcatgttgccacttcagagcctttacaactgctgttccctctgcctggaataacttttctcactcacgcataaatagctcctttacttccttcatatctttattactaccttttcaggatgccttccctggcgagcccatctaaaactcagactcctatctctagttctaaatatcctctcacttcacattttttcttagtattcttcaccatttaaaatacttcatacttaatttacttaccttgtttattatccagcccacaaaaatgtaagtaccatgatagtagggggtttgtctcttgttcactgctatatcccaagcacctaggattgtgcctgttacacagacagccttcaataaatgagtctatgaatgaatgaatccttaatatatgaagaactctggaaaagaaatttgaaaacagaacactactttagaaaacatataatttacaaaagatttttttaaatgcttgacttcaataagtaatgaaacaattgttttagagcaaattaatttatatccatgaggttaacaaagattactactatttagaatatccattgttatcaacagtgtatgaggatataagcagtcttatactatgccaataatactgcagattattggaactttacagaataattggataggttctgggaacctttaataaaagcatacattttaacctatcaattctacttttaggagtctgctccccctccaaaaaaatttagaaaagtatatttaaacacgtgccaaatagttgctgataaacacagtttataatttcaagaagctacagagaactaaatcacccatcaacaggggtaaacgtataccatgaaatactttaaaatgaatgcataatttgtgattgtttaaatggaaagatactaatcatacattgttaaacaagaaaggttggttacagagctgtatgtatagtgttactgcaattttgaagccattatgcacacatatagaacatatgaatgtatacgtatgtatacacaaaggcgggggtgaaaagatggaaagtaaattttgacagtagttgcatggcctgtagaactatgaatgatttttgttcttcgagcttttctgtatttttctccaccccactccactccccaaatggggtggagtagggaaggaggagaatgagtttagtaagtacacaaaacaacgtagctaatacacgaaaataaaattaaaaataaataaatattaaagtgttggggatatcgatgtttcatataaaaacatatttccggccgggcgcggtggcttacgactgtaatctcagcactttgggagaacgaggcgggtggatcacctgcggtcagttgttcgagaccagcctgacccacatggagaaaccccgtctctactaaaaatacaaaattagccaggcgtggtggtgcgcctgtaatcccagctactcgggaggctgagggaggagaattgcttcttcccaggaggcggaggttgcggtgagccaagatcgcgccattgccctccagcagcctgggcaacgagagcgaaactccatctcaaaaacaaaaacaaaaaaacaacgtatttccaatgaccaaagctaaagacatgcagcgctggcacaaacgccaagtctcacacatctacacccacaagcacaccctaccttgtatccacagtttttcattcattcaagatcccactgtcatgcacgtttgcacgcaggttcatactgaaagataaaagggaaagcgcctccacgaaatccgcttacggacacgatcccggggccacactcagccagacgaatgtctggcaaatgacagtcacttcacgccagactctcacagtccttcacacgccactcccactgcctcagggaaccacaagcacaggcatcgccccgcccggcgtcctcctccaaagattggggcaccaggaccgcgggcccccactcccacccagcacaaagagtccggcgctcagagctagcggtttcccgaggactcaccaccaagcccgcggacacaggccccgattccacacttaacgctgccaaagtggcagagccggcgcgggctgggacagaggcggcactgaggccggcgctgtcggtggctgagagcgccacaagtctcggtccgttacaccaggggcgacgcttcccagaggcccccgcggctcacccgggcgggactggcttcactgtttgcgcgtcctgagaagcagaccacggtgttccagggctcacagctccgcgcaggggagctcagcctaggttttgcacgagcggcctcccgcgagcccagctctgagagattgggagcgcaacttggtgctgagaagaatcgaatcgttccgctgcttcctgcgccgaactacatttcccagaggccttcgcggccctacttccccgaccccacctgcaaaaaggcacttccttcttacagtcggctggagctgcaggttcgcaaggtccgtgaaggaagcccggctcagtgtgtttagttccgtctttttgggtctctacctgaggctagaatacagcggggtgaaggtggtgagagctccagggccagtgaaggccgggtcagctggagccttaaggtcctgacagcggctagaagagggaggagtgacgtagtgtgactgtatgtgtgaaacttcggccatggaatttggagtggggtttccagggcgagagaccctgtccagtgacatctgaggtcgtgcgaatatgcgaccttttgtgtgaccatggtcgcgttttatattctcgtggctgtttgattctgaccttgcagttttgtcagagacaatgtgcatgtatttgttctttctggacttctcgattgtgagtgtgacagtgttattggatttcatgacccgggatcgtgagcgaaaagtagtgtggccagaccgcctgacttctaaacagacttggccttactagctgtgtcatctcagactaggtacttaacttctctatgcctttcgtgtttttttttttttgtttgttttgttttttttgaggcagagcctcactttgttgcccaggctggagagtgcagcggcgcgatgttggctcactgcagcctcgaactcccgggctcaagcgattctctgcctcggccttccgagtaactgggaccacaatcaagggacactccgcccggctgatttttgtttgtttgttagtagagataaggtctcgctatgttgcccaggctgctctcgaactcctgagctcaagcgatcctcccgcctgggcctcaaaaagtgctaggattacaggcatgagccgcacggggccggtcttaatacctttaataaagagataataggccggacgcggtggctcacgcctgtgatcccagcactttgggtgggcaaagcgcacggatcatttgaggtcacgaggtttttgtttgtttgttttttaagacggagtcttgctctgtcgctcaggctggagtgcagtggcgcgatctcggctcactgcaacctccgcctcctttcgcctcccaggttcaggcaatttttctgcctcagcctcctgagtagctgggacttaaggcgcgtgccaccacgcccggctaatttttttgtatttttagtagagacggggtttcaccatgttggtcaggctggtctcgaactcctgacctcgtgatctgcccaccttggccttccaaagtgctgggattacaggcgtgagccaccgtgccaggctgagggtagcgggtgggagactgccaggagtgtagtgcgcttgcgcagtttaccaccctgcatcccccccaccccgctcccctcccaatttttttcgggtatccagcacaattctaggaattcgcctcccacccattttgagtagacgcgccactagcgcgttcccacgcacaaaccttttccctgcggccaacctgcgattctcaactccccgccctggttgctaagggaggcgcgcagagcgcttgtgcctgcgcacttccacaccagcccgtgtagtgtgacgctgggccccgtccctgtgaccgggccaggctcggagctgcagggaatccggactttcgggctctctggaaggccggggagaggccagtgtgggaggacctggtggggaggaggccgtgttacaaaccctgcgcggagctgcaccgctgctgccagacactgcgacgccgcgaccttttctactccggactacgtttcccagcggaccccgcgggagttgggccggcggcccctttgtgtcctccgggggcggaggcagctgaggcgcttctttccgggcccgtaagggctgggttccatccaactaagggtagcggtgagacccgagtgcagattccccgagccttcggggcaggaaggagatcttccaccagttctgttctgcaggtcgggagtgggctgaggagtggcgtgtgggtctccggaagctcgtcgcaggccatctgtgtgactccggtgcgagtggaggttggtaccgttcagtgcgaggctgtcaccccgtgtgcctgtccacgtcctgtgtgactgggtgcgaggaagtcaatggcaccgtggaatgtgaggctgtgagttgaggcgggagcgggcgactgttcgctgcaccttgttgggccgatacccgcggcttctttgtgactgggttgtgagattgtcgcttgtgatagataccctggtggctgagccttgccggtatgggaaagggtgcccgtgtgaggcagtccatacccatggcctctgactgtggcgtgggtaagacggtggttggcactgtagtttttcagactctgattatgtgggggattgagtgagagactgtgtgccacggagaggcttttaaagccagcccaagtcatatcaatgtgccaccaagtttcagaatcactgatttattggagaggaggattgtggggtcaggtcctcttttatttgatcttggtgctcttatttgttagttctgtgtctttatgtgaaaacttacattcctctgagtctgtatttgtaaagcctagaacatctgttgttaacctaaggaattgggaaatgatttaggcatcagttaaattgtatgcaaacaaattcctaggtctccattatgctctctctattggagggaaggttgcaagaggaggaaagagaatcctaaaaagtctagactggtgattctggatgctgcaagaaaagtctagtttctcatgttcttttccccatctcagtcatctgaggccactgctatttcccaagagaagagccaggaggaagaaagaatggctgttgggcttcttaaagccatgtaccaggtgtgttggtgttttctcgatttcctgaatacctgtctgcttttcaaaacaagcaggtactaattttccttctgctgaaacgtttctgggtaaccagtcatgtcccttatcaacactctccattggattcccatcttattcaagataaacgcgtaagtccttgtcttgacctgcagggccctgcataatctggtccctgactgtccctctgacttcatctaatttttctcatcctgtctttaactcagtcactcagttccagcaacactagcttccttgtaatgtggtgagtacattcttatttattcttttttttttttttttttttttttgagacagagtctcactctgttgccaggctggagtgcagtggcgcaatatggctcacggcaacatccacctcctgggttcaaacgattctcctgcctcagcctcccgagtagctgggacgataggtgtgcgccatcacgcccagctaatttttgtatttttagtagagacggggtttcaccatgttggccaggatggtctgaaactccagacctcaggtgatccacctgcctcggcctcccaaagtgctgggattacaggcgtgagctaccatgcctggccagtgagtacattttttttttttttttttttgttgagacggagtcttgctctgtctccaggctggagtacagtggcacgatctaggctcactgcaagctctgcctcccaggttcacaccattctcctgcctcagcctcccaagtagctgggactacaggcgcccaccaccacgcctggctaattttttgtatttttagtagagacgggatttcaccatgttagccaggatggtctcgatctcctgacctcgtgatccgcccgccttggcctcccaaagtgctgggattacaggcgtgagccaccgcacccggccactgcacccatgcattcttaatgcatggccttgcacttgctattctctctgcctgggatactgttccctcagatacccgatacagaccaacttcctcactctagtctctaaccaaaaacgttcattcattctaatttttagtaagcacccattaccactgggtgtcgcaggtcttagtccctcatcctgttctctacacttactaccctggtgatctcatcctgtctcatagcctcaaataccatgtatatgccaacaactaccaaattgtgtacagcccagacctctctcttgaactctagacttgtatacctgactgcctacatcttcatttggttgcataagagatatgtcaaatgcaaacatcttacaaatggagtgaaatgagccattggcggttttggaacatgagtgacatgaactgattttcattttggtagcatcactctggttgctactgagagtaaactgaatgggacaaggatagaattagggaactcaactaggaaactcttaacgtacttcctggctccattgcttaagctaaacatcttctatcaggaaattagagacttcaaaatacatccagaatcagactactattttttttttttttttttgagatggagtctcactctgtcacccaggctggagtgcagtggcacaatctcaactctctgcaacctatgcctctccctgcttcaagcgattctcttgactcagcctcctgagtacaggcacgtgccaccatgcccagctaatttttgtatttttagtagtgacagggtttcaccatgttggccaggatggtctctatctcttgaccttgtgatccgcctgcctcggcctaccaaaggctgggattacaggcatgagccatcgcactcggcccagagaactttttactatcaccactgcttccattatgttctgtaccatcatctctcacctgtgttactgtggtactctcctaacttctctctctacctctactcttgttctttttagtctgttctcaatggagcagccaaagtgatcttgttaatacataagttgtatgatgtcattatttataggcgggggtgggtggaagtaatagaaagcatagacaactctttcaaaaagtttagctataagagaaggagagacctgggcacggtgactcacgcctgtaatcccagcactttggagaccgaggtgggcggatcacctgaggtcgggagttcgagaccagtcagaccaacatgcagaaaccccgtctctactaaaaacacaaaaaattaaccgggcgtagttgcgcatgcctgtaatcccagctactcaggaggctgaggcaggagaatcgcttgaacctgggaggtggaggttgcggtgagctgagatggtgccatggcactccagcctgggcaacaagagtgaaactttgtctcaaaaaaaaaaaaaaaaaagaaggaaagaaatgggtggtaactgaaggagaaagtcataactgacaaagtttcagaaagatggatatatgttggcaggctgatgttaaagattcagtagaaagggaaatttgaagatgaatagagaaaaaggaattgctggaacaatgtgcttaagtaggtgagaggagctaagtgtttggccttttctaggaaagtgggttgttcagttataggaataagggcatgttagggtgtacaagcacaggtgcaggtggaagtgtagatgtggtgggagtttgtgggaattatctttcaatgggttttgttttctcagagaaaataagattatcagctgagagtgagcatggggaaggagatcttgaaggtgtgaggtgagaggggacagtatcaaatggtcatttagcagagtgaagggatgaatggactagggaaatgtatcatgcagcatttccgcccacttgaggttaagtgatcatgaatttaaagtgagactgcttagcatggttggtatgattttctctagcagagttcagctatgcaggatacaggcacagagtaagcagaaaaatggctgtggtttaaccaagtgagtacagttaagtgagagaggggcagagaagacaagggcatatgcagggggtgattataacaggtggttgtgctgggaagtgagggtactcggggatgaggaacagtgaaaaagtggcaaaaagtggtaagatcagtgaattgtacttctccagaatttgatttctggtggagtcaaataactatccagtttggggtatcatagggcaacagttgaggtataggaggtagaagtcagagtgggataattgaggttatgaagggtttggtactgactggtactgacaaggtctgggttatgaccatgggaatgaatgactgtagaagcgtagaggatgagactattccaggagagaggggtcagagaactaagaggcgaggttgtggggagtattatttatgtggatatcgaagtgaccaaagaatgataggaatggcattgaagagagtaacagtgagtcaggtgctgaagaatttaaggactgacagagaactggtgtctatcagaaattagtagatatatatcacaaggagggattgtgattgacatatcctaatttcatgaggtttaaaactagatgtcttttagggaggaggaaatggtttggaaataagagcaaagaggtgacctgcctcaccttcaggtgctgtggtacaaggaatgtggggaataaaacattcatcagtgatagggcatcaggggaagtcgttctctcagctggaagccatgtttctttaagggcagaaagaaaacaggaaaaagtgggaactgtagttttgcttcagactggtttaatgataattgtgaatggattttgaaaccaagtatttgttaggggtcaaatattttaagatcagaatttaagctcctatgttgacatagaaattatttttgttgactatcaagaatcagtggaaaatatgtatgtcatatataaatatttatacatttattatatgtatttatataagctaaggaaaacattttaggaagcattgttagcaggagcagagagggagagatttacctacttcctataattaagtaagaaaaaaggtgactgagcattgaacttgaagaattttgcttctgtagagatagtttcttttgttttgttttgtttttgagacaaagtcttgctgtgttgcccaggctggagtgcagtggcccaatctcagctcaccgcaacctctgcctcccggattcaagcgattctcctgcctcagcctcctgagtaccggggattataggtgcgcaccactatgcccagctaatttttgtatttttagtagagacagcgttttaccatgttggccaggctgttctggaactcctgacctcaagtgatccacctgcctcggcctcccaagtgctgggattacaggtgtgagccatctcacccagcctagagacagtttctttaactgtaacaaaattgtgtcaaatgcaaaaggttgcattgacaggttcacatcttttaattttgtaaaaaattaaattaatacatacacatataatgtatgtttgtttcatcagcaagtggtcacattatagaaacctggaatccagtggcatcacagcagcattaagttttttttgttttgttttgtttttgttttttttttttttgagatggagtctcgccctgccgcccaggctggaatgcagtggcacaatcttggctcactgcaacctccgcctcctgggttcaagcgattctcctgcctcagcctctggagtagctgggactacaggcatgtgccaccacacctggctaatttttgtatttttagtagagacagtgtttcaccatgttggccaggctggtctcaaactcctaaactcaggtgatccacctgccttggcctcccaaagtgctgggattacaggcgtgagcccagctcagtgtcaagtttttaagaactttctctaacccctgtaggcagaagcaatattatgagtagaacacccatttctttacacaaaattttgggaactctggattaaagtatttgaattttaatggaattgatgctctgctctgcttggtctagcacagttttcagagatacagtgaatactttctggtattgtttttgatccctttctagcttcttgaaattttcttcaaaccactcattgattaattcaactgagtcagaatttgaatacttcacatgtgccaggttctattctgtacctggggataaagcagtgaccaaagccaaaacatactctgccctcatggagcttaaattttagttgaggagggtgaagaacaggcaatgaataaaataattaagtgcagtggagaaaaataaaggagggttaggaaatagggaattggggtggaagcagtgctattttatactggaataatctgagatatacaaaggccctgagtacaaatatgataacatggttacatatttgaggatgtaatatcagagagagcccagtgtgcctagggcagaggaaatgaggtgaatatggtaagagataaggttcttccatttatttcatttcaggagttggtgaccttcagagatgtggctgtagacttctcccaagaggaatgggattgtctggattcttctcaaagacatctgtacagtaatgtgatgctagagaactacaggatcttggtatcactgggtaaggatatcttcttgcaaaactgagcttctgctcaaaaggggctctttgctaccactattgtgaatttttggataatatctgcaaaatttggctgaatgtctgctgcctatgccaaacaaatggcttagtgtttgtggatttggcagtgaacatattcttggcctgtgcctgaagcttcatcttccttatccttctaatacatgtcctttacacatttctctttttgcttactgtaaactcccttttccctgatgagctaaggattgaatgtgagttctggaatatccacagcatgacaaaactctacttttttttttcgtatttgcaggactttgcttttccaaaccaagtgtgatattattgttggaacaaggaaaagcaccctggatggtgaagagagagctgacaaaaggcttgtgctcaggttagtgaagaggaaattggcaaaaatctttgcacgtgacagctcagcttgactcaaaggtatcacctcttcactcttcaggcttccaaattcttctcaaatgttctaggttttcataaaaatttggggccatttaggatgttctcccacatttgttatttttaattatttcccttctcttactttcctatctcctttctaacaagtcccatcccctctcagtttcataagcctctcagtctttaaaaaatcttgtagtagtcttataaacttttttttttttttttttttttgtgacagagtctcgctctgtcacccaggctggagtgcagtggtgcagtctcggctcactgcaagctccgcctcccgggttcaagcaattctcctgattcagccttcccaggagctggaattacaggcacatgccaccacgcccagctaatttttgtatttttagtagagacagggtttctccatgttaggctggtctcaaactcctgacctcacgtgatctgcctgcctcagccttccaaagtgctggcattacaggcatgaaccactgtgcctggcctcttataaatttttgagctctacagagcatcagaagtgtaggcagccttggggactgagtcctcaacctgagggatctgatgctatctccaggtagacagtatcaaaatagagctgaggtagaggacacccactgcagaattcattgcttgcttgttggtggagagaaacccccacattcagtcacagaagccttctgtgtttattgttgtggtgcgagagaaaaggaaaaacaggttgcatgtgtgatttttcctaaggtgctcattgtgggggaggttgtcgtgtgtgtgtgtgtgtgtgtgtgtgtgtgtgtgtgtgtgtgtgtatttgtaacttttttttttttttttgagacagagtctcgctctgttgcccaggctggagtacagtggcatgatctcggctcactgcaacctctgcctcctgggttcaagtgattctcctgcctcagcctccccagtaactggaactacaggcacccaccaccacgcctggctaatttttttgtatttttagtagagacgaggtttcaccatgttggccacgctggtctccaactcctgatctcaggtgatccgccagcctcagccttccaaagtgctgggattacagacgtgagccactgcacccagcctgtagcttatgtttttgatactttaagaaacctttctatgttctgagttcatatagatatctgaaaatagtcttttaaagattgtccttttatatgtaggtccataatccaattggaacttatttttgaggattattttaaataagaatttaatttctgtatcttatggaaaaccaaaggtcccagatattttttgaataagtgttccctctgcctgtttttctgaatgttacctcttaatataccaggttttagtctatatatgggtttgactttaagctttattcagtttcattgatctctgtttccttataccagtaccacactgtcttaataaaaatagtttattagaaggataattatctgctagggaaaatctctacagcttgtttaaattctttagaatttcttgtttgccctttggacatcaatataaagtttagggtcaacttgtaaatttctatcagaaaacaacaaaatgctgttaacttttgattcaaattttaacttttgattcaaattttatttattctgtaatcaattctggaaattttaaaaattcattaacatggtatagctctccatttatttaggttttttcacttttttcagtgttttataattttctccaaaaaaggctttgcacatcttctgttagattaaattgtaaacattaaacatattagttttgttgctgtgttaaatgttatctatattttctgtttgttgctcatatatagaaatgaaattaacttcgtatgcattggccttatatccagcaaccttgccaatctctcctgttaataatatttttaaatatgtttggattttatgtatgagtagatatatttgtgaataatggtagtttcttcattttcaattcttataccttaatttatttttctgttgcctttgtcgtatctccagtataatatgaatcgaagtagtgataacaggcattcttgtccacttccggtcttaataagaatactttagcattttgttttttaataattttgatgcttaaaagttttggtacataccctttcattcctgtttgctagagtttcattgtggaaagcttttgagttttaacaaatgtttttctccatctgtgggtgatttttacctcttaataggttttagtttttcacatcttaatgtggtaaattacatacattttcaaatgttgaaccaacattgcattcccaagttaaacccatctttatatcttttccactttttgctagttgctgtttgccaatattttgtttgggtgttttgcatctgtatttattagtgaatttgatcttcagttttcctttcttgtcagatttcggaatcaaggttgattagtctcgtaaattctctttttcttctttagaaacatttgtgtaaaataaaaattatttgttttttgaatgtttggtagaactttgttcattttggcttggaatttttattgttaaaagaatttaaactaatcattcaatttgatatgttctaaaattctaggttttctatttctcctagaggcaattagggtatttttttctaaatatttttagttttgatgtaagttttcaaacttattagatgaagttgtccattatttttctggttctcaatgatttcttgatccgtgaattatttagaagtttgaaattgaaggcttttgtttggtacttgtttaattgtattatggttagagaatgggatctcttcaatatacatttattgaaagtattttgagacttgctttatttcttagggctagttttggtaaatattctttgtgtccttgaaaataatatgtattttctggttgttgaatacagtgtttgatatttgctcattaggttaagctcattaactgtgctggtcaaatcttctgtgtccttatgaatttaaaaaaaatgtctttgagccatcaattactgagagacatgttaaagaaacttctactctggtggtaaatacataaatttttttcttgtaattgtaacagcagttttttttatattttgaaggtatttcatttggtcatatgtttttagaatgttttatttttctagtgaattcttatattattgttactctctttaattctagtgactatctgattaagcaaaaagaattcacttaatattgttatagctatatttgccttttgttaatatttacttgatgtagttttttcctactcctttattctccggcttgctgtgtgtttctcttataagcagtatttggataaacattttttaaaatccagtctgataacctttatcttttaaccaaatgatggtggtggtcagttaaattttttggtactattaatagatttggatttattttccactacctcactttcttttataaattgtgccttttcaaatttttcttatttcttggtttttctccatctcctaatttgaatgttttacaatctatttctattctgtactggttaccttagaaaatctaacatttatagtcaccttaacaaaacctaaaattaattctaatctttatatttgaccactaaaaatacaagaacgtagccaggcacggtggctcacgcctgtaatcccagcactttgggaggccgaggcgggtggatcacgaggtcaagaaatcgagaccagcctggctaacatggtgaaaccccgtctctactaaaaatacaaaaattagctgggcgtggtggcatgcacctgcagtcccagctacttgggaggctgaggcaggagaatcgcttgaacccaggaggtggaggttgcagtgaaccaagatcgtgccactgcactccagcctgggcaacaagagcaaaactccatctcaaaaaacaaaacaaaacaaaacaccaagaaccttagactgtcttaacttcacttaccctcatttcagttattccttgcttttcttaaattattattttgctttatgaagttgtataatagaccattattatatttatttaatttagaccatattatatttagtgttgtttagatttatccacttttggctaggtgtggtggcttatggctgtaatcccagcactttgggaggccaaggcaggtgcatcacttcagtctaggagtttgagaccagcctgggcagcatggtgaaaccccgtctctacaaaatgcgaaaattagctgggtatggggtgtgtgcctgtagttccatttacttgggaggctgaggtgggagggtcgcctgagcccaggagttcaaggtacagtgagctgagaacgtgccactgcactaccgcctaggtgacagagcaaggctctgtctcaaaaaaaaaaacaaaacaaaaaattatccatgtttgtcattttccctgttcaccattctgtcccagaactttttcctgaagtaacttctttataaatatttatatactattcatatcaacttttattgttgttatgttttgttcatttatatgatagttttgctgtcatgcatagaagaagctttctctgtcagtcatagattgacagattttttttttttttgagatggagtcttgcactgtcacccgggctggagtgcagtggtgcaatctcggctcaccgcaacctccccaacccgcgttcaagcaattctcctgcctcagcctcccgagtagctgggattacagggcgtgccaccacgcctggctaattttttgtatttttagtagagatgggggtttcactatgttggccaggctggtctcaaactcctgagctcgtgatctgcccgcctcagcctcccaaagtgctgggattacaggcgtgagccattgtgcccggtgacagattatttttatgagtgctttaaagataccattccatgcttttctggcttctgttcttgcttttgagaagtcagttttcattaatatattcttccttgcaacttttaagaactttcttcttcttgccctggttattctgtattttcaatgtgatgtatctagatgtaaatttcagctgctgtagttgggatttattgtgattttttttatctgaccattaatggactctgggtaattatcagctattatctcttcacatattgtcactttcccattctctgtgtttatttttcttaaaactccagttacatgtgcctaagaccagactcaccagggataaattgatgctcccagcttcagttccaccttacttacttgaaagtgccttccacagtctgtttgacctctgagagtttaccttaatttcttgccagcttggtaatgcagctaaaagaaagtttttctatttctacaaaattgtaagcttttttgtaccaggaagatttgtcattataactagtctgctgtattgccagactactttaggtacctcatataagtggaatcatacagtatttgtccttttgtgactggcttatttcacttactgtaatgtcctcaagttatatctgtattatagcatatgtcagaatttcctcctcgtttaaggctgaataatctattgtacgtatataccacattttgtggtgatttcatggaatagcaaccagctattactcctctactcaaaccacttcaatgggtctccatctgtgttaggccattgcactgctataatgaaatataatacctgagactgggtaatttctacgaaaagaggtttaactggctgtcagttctgcaggctgtacaggaagcatagcggcatcttcctccgaggaggtctcaggaagcttccaattatggcagaaggtgaacagagagcaggcacatctcttggcaaaagccaggagtgcatgagagatgggggaggtgccacacacttttaaaggaccagatctcatgagaattcgctatcatgacactaccaacaggatggtactaaaccattcgtgaggactccacccccacgatccagtcacctcccaccaggccccacctccaacattggggattacatttcaacacgagatttggatggagctgtattaccatctgttacggtttggctctggatccccatccaaatctcatcttgaattgtaatccccatgtgttgagggagggacctggtgggaagtgattggatcttgggggcagtttacctcatgctgttctcatgatagtgaggaagttctcaagggacctgatggtttaaaagtggcagtttcccctgctttctctctctctctctctctctctctctttctttctctctctctctctccccctccccccctttctccctctctctgtctctcctgccaccttgtaaagaaggtgcgtgcttccccttcatcttctgccatgattgtaagtttcccgaggccttctcagccatgcagaactgtgagtcaattaaactacccagtctcaggtagtgtctttacagcaacgtgaaaatgttctaatacaccgtccctctcagagtagaagccaaattctttagaaggccggtgaagcttaaataatctcattaccttttacctcctgactttatatcctactactcactctatagccacactggccttcttaatattccccagacatagtaaacatgcttctagttttgggcctttgaaccagctgctgcctcttccctgaatgctttttccccagagacttgaatgactgactgactttttcactttcttcaaatctttgcttaaatgttaacttgttaatgattcctagctctaatttcatcagtatccatgacatcccctaccctgattttctttctctgaagcacgtagtatcttctaacataaaatgaaatttacttatttatcacttattttctgtctcttctaagaaaataacatccctgaaggtaaagatctttgttttgtgatattaaaagcatcagaacagtatctggcaaaaggtaaatatttgttcagtgaatgttcttgaatgaagcagctaaaagaatggagactgtttcagtgtctattttatgaatacaggcataaaattgtaaccaactctgaccacatctctaatttcttctgccctgagatttactgatttttcttttataattctaatcattccttcttaggtttctgtatgacctgttttcagtttctcttcttgtacacttcagaactgcaaaagccaatgttcctgtgggttttgctatttaattcacatattttactttacagatgtactttattaaatgtactttctgatactcaatagaggagacattttttcttattattacttttcaggctgggagcctatatgtgagactgaagaattaaccccaaagcaggatttttatgaagaacatcaatcccagaagataatagaaacacttacaagctataaccttgaatactccagtttgagagaagagtggaaatgtgagggctattttgaaaggcaaccaggtaatcagaaggcgtgtttcaaggaagagataatcactcatgaagaacccctttttgatgagagagaacaagaatataaatcttggggaagttttcatcagaacccactgctttgtacacaaaagataatccccaaagaggagaaagtacataaacatgacacacaaaagagaagctttaaaaaaaatttaatggctattaagcccaagagtgtctgtgcagagaagaaacttttgaaatgtaatgactgtgaaaaagtcttcagccagagttcatcccttactcttcatcaaagaattcatactggagagaaaccctataaatgtatagagtgtggaaaagccttcagccagagatcaaatcttgttcaacatcagaggattcatactggagaaaaaccctatgaatgtaaggaatgtaggaaagccttcagtcagaatgcacacctagttcaacatctgcgagttcatactggagaaaaaccttacgaatgtaaggtatgtcgaaaagccttcagccagtttgcctaccttgctcaacatcagagagttcacacgggagagaaaccctatgaatgtatcgaatgtgggaaagcatttagcaacagatcatccattgctcaacaccagagagttcatacaggagagaaaccctatgaatgtaatgtctgtgggaaagcatttagccttcgtgcataccttactgtacatcagagaatacatactggagagagaccctatgaatgtaaggaatgtgggaaggcctttagccagaattcacaccttgctcaacatcagagaattcatactggagaaaaaccttataagtgtcaggaatgtaggaaagcattcagccagattgcctaccttgctcagcatcaaagagttcatactggagagaaaccctatgaatgtattgaatgtgggaaggcttttagcaatgactcgtcccttactcaacatcagcgagttcatactggagagaaaccttatgaatgtactgtttgtggaaaggcttttagttactgtggatcccttgcccaacatcagagaattcatactggagagagaccctatgaatgtaaggaatgcaaaaaaaccttcaggcagcatgcacaccttgctcatcaccagagaattcacattggggagtcactgtcaccacccaacccagtcaatcaccaagtcctatagatcctgagtcctaaatgtttctagaatttatactgttttttatctttaatgttgtcaccttggtctgattcatctcactctgattactaatatagctttcaaacaggttttcctgtatttatttttgctacctttaaatccatttcccacaatgcactcaaacggatcttttttttctttttttttctttttgagacaatgtcttgctgtgttgcccaggctggagtacagtgggacgatctcagctcactgcaacctctgactcccagcctctgcctccagggttcaagcaattctcatgcatcagcctcccgagtagctgggactatagacatgcaccaccatgcctggctaatttttgtattttttagtagagatggggttttgccatgttggccaggctggtcttgaactcctgatctcaagtgatctgtctgtctcggcctcccaaagtgctgggattacaggcatgagccaccacgcccagcctcaaagtgttctttttaaagaataagaaaacacacatgggctgggtgtgatggctcatgcctgtaatcgcagcgctttgggaggccaaggcaggcagatcacccaaggtcaggagtttgagaccagccagactaacatggcgaaactccatctctactaaaaatacaaaattagccgggcgtggtggtgcacacttgtaatcccagctactctggaggctgaggcaggagcattgcttgaacccaggaggcagaggttgcagtgagccgagatggcgccattgcattccaacctgggcaacaaggctgcaactccgtctcaaaataaaaagaaaagaagagaaaagaaaacacatgttactatctccagttaaaactttttttttttttttgcttgttattgttcttagactaatattcacagcctttaaaattgtctgcaaggcttttgttatttggttcttacacaccattcagccttattttattccagtcttcttctttgggcactaggcacttcccaggactaagagcttagattctggaaaatcatagctccaacactactatggcattgcgtgactttgagcaatttgcttatctaaacctcagggttttctttaaatcttaaaataggaataatataggatactgtactgtagaaatgtaagtattaagtgaaatagtgtctgttgtagattgatgcatattaaatgagaaatttgcatgtaaaatacttcatatagtctgtcaaatatagcagatattcaataaatgataatagctaacatgtattgagtgcccactacacatcaggcactgtcttacatactctacatatattaactcatctactcctcacaaaacaagattccttattggacaaagtggagcattcctgcaaaacaccagttcagaatttggaaaatctaaaaatgttagaacataaatggcagtctttgtactgtagcttagtagttgttatgaagtcaggtagtggaactataacactgacagccagttttaggaagtttctacagataatgaattggataagccaattaagaaaaatagaattcactgggaagaatgcagaacctacatttaaatcaaggaaggaatagaaatggtcacaattaaccaaaaaaaatcaataaacatagaaattcatgtgatccccttaaataggcaccacaccctggccaggtgcagtagctcattcctgtaatcccagcactttgggaggccgaggtgggtggattatgaggtcaggagttcgagaccagcctgcctaacatggtgaaaccccatctctactaaaaatataacagttagccaggtgtggtggcgcacgcctgtaatcccagctactcaggaggctgaggcaagagaattgcttgaacccaggagacagaggttgcagtgagctgagatcgtgctactgcaccccagcctgggcaatacagcaagactccatctcaaaaaaaaaaaaaaaaaaaaaaaaaaagcactacccccagctaattgtatggttaaattcgggtaatttagaaggcatgtaaagtgttccatactatagaaaaatgtaaagttttaaaattatttatccagtggttgcaaaattgaaatcaaaaggggattaagggaagaaaacagatagatacacaaataatataggcattcattctgttaatattgagtaattactgtttgtcagacactgttttaggtatgaggaaatgacagtgagcaatacaaaggccacattctcatggagtaaaattccagaggtggagacatgtaattaatacttaaatataaaacagtagattttctaaacgcagaaaacggaagagtaacaagaaactaaatcaaggagcattatatagcctagactgcagagactcaatataataaagttggcgattcttcctaattatcaaatttactgcaattccagccaaaatgtttcagtggttttttttgtttgttgtttttgtttttgttttgccctttagcttcacaggtttgttctgaaatttatgaggtataaattcttaagagcagcaagaaaaatttcgaatctatttgtagaaactgcatatgatgatggttcataccagtagagagaaagattggatttgggggtattactagtagtaaggggattcactagtagtaagggaaatgcaaaataaaatcacattgaactagttcaaaatcatcacattggcaaaagcattagagtgccaattactggaaagatgtggagcaataggaacactcatacggtgctataggaagtagttgtgtttagcataatttggcaatgtctagtaaagttgaagatgtgaataatctttgacccagcaattccatgtttaaacctctacatagtctctcctcgtgtttcaaggagatacatatgatggtccattgcagaactgtgagaatgagaagttgaaagcaatctaaccattaggttaaatacaagatagaatgcaaactaaaatgaataactagagatatttctgtcaacatgggtaaacctcaaaaatagtattaatgaaattgaactacagactattttatataatacagtataacgtacaatttcaaaacatgcaaattagtgttatgtatttttgtcatggctaaatactatataaaaaggatctaaaagaattaataaaataatcatcagattcagaacagtggtgacctgcagggagaaagacaactgagattggggaaaggatgcaaatgaaaatacctttaattattcatttcttttaaaaataagcaaatactgtatagccaattcttaaaatttgataaagctggctgtgagtatatgagtcagttcttactctctgtatctttctgtataaactatttcataatgcaaaaaaataaagaatatttaaatgatgtttgcttctatcagttctttttttttttttcttttttgagatggaggctcactctgtcgcccaggctgtagtgcagtggcatgatctcggctcactgcaacctccgtctcccaggttcaagcgattctcctgcctcagcctcccaaatagctgggattacaggcacacgccaccacgctcagctaatttttgtatatttagtagagatgtgcttttgccgtgttggccaggctggtcttgaactcttgacctcaggtgatctgcctgcctcgacctcccaaagtgctgggattacaggcgtgagccactgtgccctgtcagttacttttttactattcccaaggtgtgccactggtattcctgtatccaccattttcttcagaaagaagcttatatatggtctatttgcagaggcaaccattgttaacaattttaagactatctttccatgtttgactcatttgagaatgacgttttatgctaagggttttataagcctaattttcccatcatcattcttattgttttcaggaccccattgtatatgcaccatgatttgttaatttccctttgtgtactaagtgtccagaatttttgtgggccaattactatcctttctgaactcaattttctcagatgttaaagggaggtaattctttgttttagaactgttacatgcatttgtcataatacatgttaaatttacagcagtatttagtaaaagttattattttataaaatatactgggggttgtgaaaggaaacaggaagggaaatggcatgaggctgttacagtagaagcaagcggtagagacagaaatttacttcagataggcagcatacagaaacaaatacatagtaactctggattttaaaatggatgcctaacttagtcactgtgattataatcaatatccagcagaatttgttgatagcttcccatttttattatatttttctcatttataagtcaatggaaaaataagcaattaagaatatcaaggaaattgtctatcactgtcaaagagaggcttcagacatccatagctgaatggttgaaaatatcaacagaaacaggatggcagagtgaggaagagtgcttgtccaccacactccaacacactgaagtgaaagttaaagcagtagataaaaattaaaacccggctgggcgcggtggctcatgcctataattccagcactttgggaggccaaggtgggtggatcacgaggtcaggagttcaagaccagcctggccaacatggtgaaaccccatctctactaaaaatacaaaaattagctgggcatggtggcgtgtgcctgtaatcccagctactcgggaggctgaggcaggagaattgcttcaaccgcgacctgggaggcagaggtagcagtgagccgaaattgcgccaccacactccagcttggacaacagagcgagactctatctcaaaaaaaaaaataaataaataaagcccttcttctcttccctattttgcctcattcactcattcatatcctttagatagagatacttgtggaatctgagctatagcctagtgtctcttttttttttttgagacggagcatttctctgttgcccaggctggatacagtggcgctatctcggctcactgcaacctctgcctccccagttcaagcaattatcctgcctcagcctcccgagcagctgggattacaggtgcccgccaccatgcccagctaatttttgtatttttagtagagacagggtttcaccagtttgtccaggctgatctcgaactcctgacctcgtgatctgcctgcctcagcctcccaaagtgctgggattacaggcatgagccaccgcgcctggccacatagtgtctgaaagtagttaaggaaataaaaactgcctatgtcatatcgtgtgactgtgctgtataaatcctatgctcatgaacagctctgaggtgagctgtattcaccaggcagccagttattgaacatggattatagactggcaagtggatacaaaagctggtgggtgtgaagtggtactacttatgggttttatttgcatttctctaatgactgatgatgttgcacatcctttcgtgtgtgtattggccatttgtatatcttctttggaaaagtgattattcaaatccacttccaattttaaattgaattgcctttttattgttgagctgtaagaggtcttcgtatattctgaatacaagggccttgtcagatatgctatttgcaaacattttcttccattttgtagactttcctttcactttcttgatagtgccctttgaagcaaaaaataaaaaacaactaaaaaaattgttaattttgatatactctaatttatctattttttcttttcttgtttatgcctttggtatcatagctaagaaactactaatctggccaggtgcggtgactcacacctggaatcccagccctttgggaggccatggcaggtggatggcttaagctcaggagtttgagaccagcctgggaaacatggtgaaaccccgtctctatacaaaatacaaaaattagccaggcatggtggcatgtgcctgtagcctgtagtctgaactactctggagtctgaggtagaaggatggtttgagccatgattggataatgggggcggttttccccatgctgttctcgtgatagtgagggagttctcatgagatctgatggtttaaaagcagcagtttcccctgctttctctctctctctcctgccaccttataaagaaggtgcctgcttccccttcaccttccaccataattgtaagtttcctgaccttccagccatgcagaactgtgagtcaattaaccctcttgagtgaagatatctctttgatatattgatttccttttttgtttgttttgttttgttttgtttttggatgtctacctagcagtgagatgagattgctggatcgtatggtagttctatttttgtttttttgagaaatctccagttttctataatagcatactaatttacatttccaccaatggtgtgtaaggattccctttcttcacatcctcaccaacacttgttatcttttgataataggcattttaactgaggtgagatagtatctcattgtggttttgatttgcatttccctgatgattagtgatgttgagcattttttcatatacccattggccatttgtatgtctcttttgagaaatgtttactcgaatcccttgcgcatcttaaaatcagatttttttgctattgtttaagttccttatatattttgcttatcccttattgaatgtctagtgtataaatattttcacccttactgtaggttgtctcttcactctactgattgttttctttgctgtgcagaaccttttcagcttgatataatctcatttgtctatttttgcttttgtctcctgagcttttgaggtcttacccaaacaatttttgcccagaccaatttgctgatcacttctccaatgttttcttctagcagttttatagttttgggtctgccatttaagtctttaatccattttgagtttatttttatgtatggtgagagatagggatgtagtctcgttcttctgtatatgcatattcagtttttccaacaccatttgttgaatatagtgtgctttcttcaatgtatgttcttggcacctttatagaaatgagttggcactaatttcacggatttatttctgggttctctgttcagttccatcagtctacatatctgtttttatgcccgtaccatgctcttttgattatcatagctttgtagtatattttgaagtcaggtagtgtgacacctccaggtttgttctttttgctcaggatttctttggctattcaaggtcttttggggttccatagtgaattttataattacttttaatatttctgtgaaaaatgtcatttatatttttataggtattgcatttaattggtagattctttgggtaatatggacattttaacaatattaattcttctaatccatagccatggaatatcctttcatgttttggtgtcctatttctttcagcagtgttttgtagtttttattgtggagatttttctcttctttggttaagtttattcctagggatttcattgtctttgtagccattgtaaatggaactaacttcttgatttcttttttagattgcttgctgttagcatagataaatcctattgatttttgtgtgttcattgtgtatcctggaactttactgtttatagttctaagagttttttggtggaatcttcaggtttttctaaatataagatcatttcatctgcaaacaaggacaatttgattactttccttctaatttgggtgtcctttatttcattctcttgcttaattgccctgggtaggacttccagtattatgttgaataaaagtggtaaaaatgggccgagcatggtggctcacgcttgtaatcccagcactttgggaggctgaggcagatggatcatctgagatcaggagttcgagaccagcctgaccaacatggagaaaccccatctctactaaaaaatacaaaattagctggcatggtagcgcatgcctgtaatcccagctattcaggaggctgaggcaggagaatcacttgaacccgggaagtggaggttgtagtgagctgagattgtgccattgcactcctgcctgggcaacaagagtgaaactctgtttaaaaaaaaaaaaaaaaagtaaaaatggcgtctttgtcttgttccagtccttagaggaaaggcttttaatttttcctgttcagtataatagctttgggattatgaagcccctcccttcttaaggggtcacctttttaaaaacaagaggactacaccaccacccaaccacaaaaacctcctgaggaactcatttagactgacaagaggtgcagaaagaggttaaataaggtgcttataactcctttttctccttcccctaatgatagcacctaactgaacacagtccattcatgcagaaaaggagagtaatttgaggatggtattgttaactaaaaccgtagcctttatggaaaattcaccactcttgcacaaacatccaggatccacatggctattgggagtgatttctcctgcattgcctccagcctttcctaacatgtccttctctctttgtctttcatatctgtgatggagcttcattcatgtgtgtgtattcctctgtttctgtgtgtcttttgaacaagtaaggttttgcaattaaagaatgactgaggccaggcgtggtggcttatgcctgtaatcccagcactttgggaggccaaggcaggtggatcacttgaggtcaggagtttgtttttttttttttttttttttgagacggagtcttgctgtgtcgcccaggctggagtgcagtggcacgatctcagctcactgcaatctccgcctcctgggttcacgccattctcctgcctcagcctcctgagtagctggaactacaggtgcccaccaccacgcccggctaattttttgtatttttagtagagacggggtttcactgtgttagccaggatggtctcgatctcctgaccttgtgattcgcctgcctcggccccccaaagtgctgggattacaggcatgagccaccgtgcccagccctggccaatatggtgaaaccctgtctctactaaaaatacaaaaaacttagccgagtgtgatggtgggtgcctatattcccagctacttgggaggctgagacaggaaaattgcttgaacctgagaggtggaggttgcagtgagctgagatcacgtcactgcactccagcctgggcgatagggcgagattctgtctcaaaacaaaacaaaacatatatccaaccacagccatccctggccttctaattcatgttgtctgttatttcatctgtactttcccttttattctttttttttttttctgtgcttggatgccaactttatttgtggtcaatataacttagagtcttcattttccatttttgtatatattctgttaatctatggtatcatctaccaagtcttctgccttaaaaaactcacagagatcatttcctttttgtaactcatcctctactctcttcattcaattagttacatgttgtacacatgtaccttaaaacttaaagtataataaaaaataaaaaaagaaaaaaaaagaaaagtaaattatgtcattcaatgatccaatgagagactactgcaatgacaaaatagttggtttggagagagttttctggagtccagtcctttttattctttttaagtagagacaaggtttcaccatgttgcccaggctggccttaaactcctggactcaagcaatctgccccctttggcctcccaaagtgctaggattacaggcgtgagatgctgcgtccagcccctttttattcttgagtgatatccagttcttctttcactgtatgtgacttcctaagagtgctaaatcttctggcttccactgatttccattgagaagtcctttttttttttttttttttaaaaaaaactttgcaagcttctttgtttttggtttcagcagatttcttctcatcttagttatgatttccttttcattagccttttaacaaatgtggtttttttttttgaaatggagtttcactcttatcgcacaggctggagtgcaatggcacgatcttggctcactgcaacctctgcctctgggttcaagcaattctcctgcctcagcctcctgaggagctgggattacaggcgtgcaccaccacacctggctaatttttgtatttttagtagagacggggttttaccatgttggccaggctggtcttgaactcctgacctcatgatccacctgcctcggcctcctcccaaagtgctgggattataggcatgagctactgcgcccatcagagacatgtttcttgaaagtatgcccttgtcaattaaaaaaaaaaaaccaaatagcccaggagtttgagaccagtctgggcaacatagaaagactccatctctacaaaaaataaataaaattagccaggcatggcgggacgtgcttgtaatcccagtcacttgggaggctgaggtgggaggatcacttgagctcaacaggttgagattgcagtgagccaagatggtgccactgcactccagcctaagtgacagagcaagaccctgtctcaaaagaaaaagaaaagaaaagagtaatccatagtgaggatgttaggaactattataaaatcataactaatgatggtcaaatgaaatataaaaataataaaaatatattattttcatttaccaaaaaagtgtgccttcttttcatctaccagttttctaatcttccagtattttctgcaccttctgaatctcttttccttccaggaccctgatttaataaaagtaagacttaattattatataccttgtgcctgtattagcttttttctcctcattttctcctgaaactctattacagaattcatgtcctcttttccacttgattaactttttgttccctgtgtgtaatctgatctttacatccattgtccttttagttatttgaaagtaatgaaaatcaccatttggattttttttttttttttttgacagagtttcactctgtcacacaggctggagtgcagtggtgcaatctcagctcactgcaacctccacctcctgggttcaaacaattctcatgcctcggcttcccaagtagctgggactacaggcacctgccaccacacccggctaatttttgtatttttagtacagactgggtttcaccatattgcccaggctggtcttgaactcctgatctcaagtgacccacctgccttggccccctaaaacgctgggattataggcatgagccaccatgcctggcccattttttttttctacaatagtttcaatcctctgccaaaactaaaatcttctatatgtttttatatactaggtatagttattttttataagtgccatatactttaaatcagttttattgtggtatgagttatgtatgtagtttaaaataaaataggccgggcacagtgggtcacgcctgtaatcccagcactttgggaggctcaggcaggcggatcacaatgtcaagagatcgagaccatcctggccaacatggtgaaacccggtctctactaaaaatacaaaaattagctgggtgtggtggtgagtgcctgtagtcctagctactcaggaggctgaggcagaagaattgcttggacctgggaggcagaggttgcattgagcctagatggcgccactgcactccaacctggtgatagagtaagactccatctcaataaataaataaaaataaaataaaatacatcaatcttaaggatgaagtttgatgaggttggacaaacaaaactgaaagtagaatatgcccataagaaaaacctcacacatgagaatgggcagaaactggaaaggctttgagaaactgttaatgaaagcaaaaagaaagaaccttgaagaaattttttttcactgtgttaatttatttaataactgacaattttattattatcaccgttttaaagatgagacaattatagcatagaaaattcaagtaaatgccccataacaccaacccctcaacctgtttcttcttatttcctggacccttggccatatgcgtggaatctgagaatggcatctagttggctttaaactcacactaatgaagctgcaatctggaggtcaggaagtttctggaaattgttgctggtgatgaattcacttagatgcgtacatctactggtctagacatcactccactgctgaaaaaaggcatctacctcccttctttatccaaatcttatttgaaagcatatctttggcagtaaccagactgtctttaggtgacttttagcaagttgtctaggaagtgaaattgttaggtttccagcccctgaaacaaaggtaagagcgcaaaaagaggtagaaattagtgctgattagaaataaacaatatctactaccacatatagaggacagagtgggaaataaaccccataatctaaacagaggcaactactgcagctcctataaagactttggaggcaggggtaggttctatgatgcaatggtatctacgtgccagcagataacaagggctagttgcaactgtaatgtatattcgtatttcttgaagactcaccattgtgggctaagagaagttgaatgagggcctcgaacccaaaccaaagcaacatctctagttcaaagctactctgtttagatgaatctgcttatactatctgttgtttctatttgatctcattcatgtggttctgttcccttgcatgctggatatctgtgacaacttgctggtcactgtacctgaaaaattatttgtggatgctccctcaggcgtaaagtgcctccagagtgggttctcatttaccccttccaggtatcaccagtccaacccatctcaaattgagttcataatgtgaaattccttaatttactgagcttatgaatccaaagcttcccatacctggtgaaatataaaaaggaaaaaaagaaaaacagggctttaccccaggaaaatcaaaccagaatttctggaggtgcccaagaattgggattttaaaaatctctttgggtgattttaagatgtagttagaattgagaacaaccaggctgggcgtggtggctcacgcctgtaatcccagcactttgggaggctgaggcgggtggatcacaaggtcaggagttcgagaccagcctggccaatatggtgaaaccccgtctctactaaaaatacaaaaattagctgggcatcgtggcaggaacctgtagtcccagctacttgggaggctgaggcaggataatcgcttgaacctgagaggcagaggttgcagtgagccgagatcgcaccattgcactccagcctgggcaacagagcgagactccgtctcaaaaaaaaaaaaaaaaaaaaaagaattgagaacaactggagatgaaccgagtatggagatcaggtcataaaaaaggaacctctagacttaaatattatttcctaatatgatctttaattgtggtcacttatagatagcattgaccataagctaacagactagaatctactgtttttttctttttcttttcactttttaatatagaaaaaaatcagacatatataaaaacagagaaaaaatatgaatagatcatcatgtattaattacaccaattcagcaattatcagcagtttgccaatttggtgttaagaaaaattatcagctgggcgccatggctcatgcctgtaatcccaacacttcgggaggccgaggcaggcggatcacctgaggtcaggagttcaaaaccagcctggccgacatggtgaaatccagtctctactaaaaatacaaaaattagccgggcatggtggtgtgtgcctgtagtcccagctactcaggaggctgagggaggagaatcacttgaacctgggaagcagaggctgtagtgagccgaaatcgcgccactgcactccagcctggacaacagagtgagacgccgtctcaaataataataataataataaattatcaaaaactagatgtatagagcacctttgacatacctaactccatcttagaaaaagactccatttcatttttcatagaacactttgccaacaggatgttttgcttaataaacaaaaaaaaagaataaagactgcatccaaccagttaaggacatgaacaagcacattcttccatcatcagttctcaccagaggactctgtgactataaaagattagggcttcagcagcttgaaacggccgtcttaactgacactatcttgtagttactcatgataagaacttggcatctgctgtggaaggctgtgccacatcaaaaactctttcttgcaagactgatggactgcctagtccagactaggacctcttttgtctttgcccatggactggttccttaaccctttctcctatctctttttcctcttgatattaaatgttactttgttgtagaatgtttgaccaagaatgtttatatattaagtacactattggccaggcgcagtggctcacacctgtaatcccagcactttgggaggttgagacaggcggatcatgaggtcaggagttcgagaccagcctggccaacatagtgaaacaccatctctactaaaactagaaaaaattagctggggatggtggtgcctatactcccagctactcgggaggctaaggcaggagaatcacttgaatccaggaggcagaggttgtggtgagccgatatcacgccactgcacttcagtttgggcaacagagtgagactctgacccccgcaaaaaaaaaaaaaaaaaaaaaaaaaaaaaagtacactattatatatgctttgcagtattgactgacttctggagtatcttgaacctgtgtgcctgcggctctgcctctggagtgaaggggaagtactaaggagaatgcctccttgggaactccacatagctcatggcttttgttattgaactagcatcaataaaagcctgacattgtggcaagatacaagcatgtgtgcccctggatatctctaaccttgcaccactcatgaaactaggaaataaggaaaaaatattattttgttatcccatatatctttgcaaagtcatactacagcacagtctaacaaactgttctagggactggttttccaacactcagcaccgtttacattttgggccagataatcctttgttacagaggactgttctctacaacacagagtggctggaagcattcttggcctcttcccactagatgccagtagtatcctacccccatcattgtgagaaccaaaattgtcttcaggcattgccaaatgtcccctggggcttaaaactgccccaggttgagaattcattgctctggtgtaatgaacctttatttgattgactgttatttattaggatgtaggtggtgtaaaaatagatgttaacttgcagacaactgatgcatttttcatttttcttttttttttttttttttgagatgtctcaccctgttgcccaggctggagtgcagtggcgtgatctggactcactgcaagctccacctcctgggttcacgccattctcctgcctcagcctcccaagtagctgggactacaggcacccaccaccatgcctggctaattttttgtatttttagtagagacggggtttcatcatgttagccaggatggtctcgatctcctgacctcgtgatctgcccgcctcggcctcccaaagtgctgggattacaggcgtgagccaccgcgcccagcagacaattgatgcattttcatatattcatctggtatagctacaaattgattctgtgtggaagaaataaccttaaaggtatggttttattgccctgtagggatattaaatagttttatatctaactttgcaatcttattcgaagattctattgtttttcactgaagataggtatatacctgttcacttggaaatcaatttccaatgcccttgctaataagtgaaatgaatctttgaatatctgtaaaagagttaaaaattataagtttttgaaaattatactttgatacttgtttcacccattgccccggtgctcttcctgcctccacatactctgaggacaggatgggctgtggcctctcctcatcccaggctacttccacggtcaaccttgatccaggagatggtcacatcccacccagatccagagcaccctacactcatgccaagatacagccctattgacactcaggccacagcctgggaaagatggcaagaccccatctctacaaaaaaataaaaataaaaataaattagctgggcatggtggtgtgtaccagtagtcccagctacttgggaggctgaggcagggggatcacttgaggccaggagttcaaggctgcagtgagccatgattgtgccactgcactctagcctgggcaacagagtaagatcctgtctctaaaaaaaaaaaaaaaaaaaaaaccaaaaagccaaactaaaccagacaaaacaccaaaaaataaaaataaaaaaaaaacagcaacaaactgaagggggcctgcccctccacacctgtgggtatttcttgcaaggtggagacgagagactgagaaaagaaataagacacaaagtatagaggaagaaaagtgggcccaggggaccagcgctcagcatacagaggacccgcgctggccccagtctctgaattccctcagtatttattgatcactatgttgaccatctcggagaggggcatgtggcaggactatagggtaatggtggggagagggtcagcaggaaaacgtgagcaaaggactctgtgtcataaataagtttaaggaaaggtgctgtgccttgatgtgcacgtaggccagatttatgtttaactttacacgaacatctcagtgcagtaaagagtattgccaccagcatgtctcagcaaccacaaggcggttttctcctatctcggtaaatagaatgtatgatcaggttttatgagacattccattcccagggacgagcaggagacagatgccttcctcttatctcaactgcaaagagggcttcctctttcactaatcctcctcagcacagaccctttacgggtgtcgggctgggggatggtcaggtctttcccttcccaggaggccatatctcaggctatcacatgggaagaaatcttggacaatacccaggctttcttgggcagaggtccctgtggccttcctcagtgtattgtgtccctgggtactcgagactggagattggtgatgacttttaccaagcatactgcctgcaaacacatttttcacaaagcacatcctgcacagccctaaatccattaaaccttgagtcaatacagcacctgtttctgcaagcacagggttggggctagggttacagattaacagcatctcaaggcagaagaatttctcttagtacagatcaaaatgaagtttcttatgtcttcctttctctacataaacacaataacagtctgatctatttttctttcccccacaacaaacaacactcaggcccaggtaaggtcctttctgctccagagcaaggaagcgctgtgcctccttttaggccaaatttggggccctgtacccttttaaatgatgacagtgtctagggccaccacatttagttcaaggcttggacctataggcataagctcactggaacaggtgagagctgatggtcactgcaggttgggttagcccagagccttggagctagtctgcctagaggctcctttctcgaattcctctgcctagaggaatcacactgtcataggccataaatgctaatgatgaccttggcagggtcctatctttctgcagactatgataaagttctgttacttcttttctcactccctctgttccctggcccacatcattactcaatactctgaatagtatgctttttcttttaaaaatgaaggtataatttacatataataacacaaataagtgttcactttgatgagtctttgacaattacgtaggcccatgaaactaccacataaaacaagacatagaacattttcctcaccccctaaattatcttcgaagtcatagccccagccaggcacagtggcttacgcctgtaatcccagcactttgggaggctgaggcatgcggatcgcttgaggtcaggagtttgagaccagcctggctaagatggtgaaacgccatctctactaaaaatacaaaaattagccgggtgtgatggcgcatgcctgtaatcccagctacctgggaggctgaggcacgagaatcacttgaacctggaaggaggttgcagtgggccgagatggagatctcaccactgcactccagcctgggagacagagtagagactctgtctcagaaaaaaaaaaaaaaaaaaaaaaaatagcccctggagtcaactgctttctgatttataactcaatagatctgttttgcctgttcttgagtttctcatgactggagtcctacagtgtgtactcttcttttacctgtttcctctttccatgtgtactccttccccaatcaagaggtcagctccttgagtagcctctatttttactcgagtactcagtcttctttttcccaattcagttgctgagatatatttaggttctaataaattttgggtaaaatttaataatgatgctaatgatcctttacttctgaataacacagaaacacccagctctgaatccttgttgctttatttactcactgaatgattacggacaggtcacctcacccccgtgttgcagtttcttttgaagcgtgatgataacactatctttacaatgtttgtggcagtctttaatgttattccaaaatatcgccagctcttcccatcccagaattatggtaggattacatgtctgctatcacactcctgggtggccatgtgacgtctcaaagactagtgaatggaaatgacatgtatagtttttgaggcagaacgtttaattcccagcaaaagaccctcaaaggctgtctttccctcggccttcatgagtgacaatttaccagttgtggctgctttattggtctaatcctagaataagaacagcccttgaagtgagcaggccagtgatcaatcaggcatttaataggcactttataaatactcattttacttcaatattattatttttgtttttttagagacagagtctcacccaggctggagtgcaatggcacaatcttggcccactgaaacctccacctcctgggttcagtgattctcctacctcagcctcccgagcagctggaattataggcgtccaccatgccggctaatttttgtatttttagtagagacggggttccaacatgttggccgggttggtcttgaactcctgacctcaggtgatctgcccaccttggcttctcaaagtgctggaattacatgtgtgagctaccatgcccagcctaaatggtgattttaaattaattactataatcacttcaaagtgttgtcatataaaccacttatattaaatcaaatgaagcaaggacccttgacctctttgttaaattttaaaaatctagcagagccataggcctttaatttttccatcgcaaggaagaagaggaaactggtaataatctcctctgacagaataatctcgcaactttaggaactttatttaaagaattcagaaatggggttgggcgcggtggctcacacctgtagtcccagcactttgggaggtcgaggcaggcggatcacctgaggtcgggagttcgagaccagcctgaccaacatggagaaaccccgtctctactaaaaatacaaaattagcctggcgtggtggtgcatgcctgtaatcccagctactcaggaggctgaggcaggagaatcgcttgaacccgggaggcagaggttgcggtgagctgaaattgcaccaatgcactccagcctaggcaacaagagcgaaactccgtctcaaaaaaaaaaaaaaagaagaaatgtcaattgtagcattttaacacagcattgaagttatctactgatgcatagcaaattaccctaaactcagaagcttaaaacaacaaacatgtagtatcttacacactttctgagggtgaggaatataggagctgctatagctgagtgcttgtgactgtgtctctcacgcagttgcagtcaaactattggcaggggctgctgtcatctcaaggtttgactggggctgggagatgtgcttccaagggtgatacacttggttataggaaggccccagctactcccaggctattgggtggagggcttagttccttgctacctgggcctctccataggctgtctcggtatcctcatgacatggcaactaacttctctcaaagtgggggcagcagcctttaagacagaactcaaggtgccatttattatatttaatctcagcagtgacatctatcactgctactgcattctattagtctcacagtccaaccctggtacaatgtgggagggaactacataagagtgtgaatagtaggaggtaggaatcattgggaaacattttgaggtcagttattgtatcagttgctaggatgaccagttggaattaggatttttttaaaaagccattttcataagacaaggcaatcttttctagagatgttccaatacctgtgatatgcggagcactgcgctaggtggtattcaaggcaggcctgtagtgaatgctgttggacccagccaccacccctgagcaatcatatgcagaccgctggcttcttaactgcagacacctacagactcagcctaagactttcccacgaggcaggctcgaagtgctggagctttaacacctctggagtggccctaaaacaattaggaagagagatggtgtagacatatgtaagcttcatcggcctggtggttgtgaaaacttggaagtggtttctacacaatcccccagaggtcccaagctgactgagccctcattgatccagagctaatctgctcacctatgcactgtatattcgttcccatcgctcccgtctcacttctccatcccccacctaccaaataaactgcttgcactcattctttcctcaggtcggcttctcgggcaagcctccttaggtaaaaaccttgctttcaacatttcctttccattatgcgctaagaactctgatctcttcccgctgcggcagccccgccctttccttgcggctccgccctttccgtgaagtcacgcccgtccttaggctgtctctgtctccctaagagcgagtctcttcgctgctctctaactcctagagctggctcagaaagagtttcacattgccataggggagctcctaggagaggctgcacccattgcacgtaagaagcggtaaaaatgtacgcggccatcttaccaggctgccggagacaaagaaagctcagctttgatgtctgggcgccaccatgttggccacaggaggttttggcatctgagatgctgagttaagagcagagacgacatctctgtttagggatccagggacacttccttctccttgtcctaaaatagccttatcttttggtctagcaaagggcttaatcatccgttttacggcacagttttaaacatggccgccccaggtaggagtcaagtgggcgtcgccatcatacctccaattacagctttgagaaacccagaatcctgttcactggaaggttgccgggtggcggctgacagcctcaaagtcgcaattgagtctgcgcaccggccattcaggatgggacgaccttataccgcggtgaggcggcgtggcaggacgaccaatttcagattcagggcgcggatgcagcataaatgggaaggcacggtttgagaaacggtcaaacctgggactagtggaggatagtgagctgccgactacggtggccgactgggtcagctatgggtgcccgtgagggtcaatgacaagggaactgaagggttaagagattcggcgtctgagcctcgcggggcctcagtggtggcggacagaggtttgcgggagtcagtggcacggtctctgaagaagatggattgggagtgtgtgggaatcaataaatgcgagttctgtgaaatgtcttgattttcagggtgcatggggtcagtaatagtggtcttcatgggtctggggtcagttgggatttttcagacactggtttagagatctttaaggttaatgatcggagcccgagaggatcagtgatcggaggttctaagttctgtgggcagtaatagtttgggtactggaattggtgattgtggaaactttggggttcaaatgagggaggtcagtggtgatgaatgtttggagaaatgttttgggccatcggtgattgagacttacttcatatcatcggtggaggatcggagagtattaacgattggacttttgtagatcagggaatggagaatagagtcaagtgtgcttatcttaaaggtacgcctcaatgaggctcagtgattcggactgtcacttgtgggtgggagtgggactgtgagaatcaacaattgatcctcagtcgttgggatatcattggcaatcagtgtggattcatgattgggggctgtgtaatttcactggcaatcagatcggatcggtgttctttgtagttactgacctgtagtctctcctggtcagatttgaacataggggaatatcagtgactatgaaaacctctgagggttggagattggaggccagtgattgggggcactatgcgtgtctgattaggagacttataggggttggtgttgagggtcctgaaatgtggagattggggatgggaaaatcacagatttgaggctgcaagcctgcatagcgggaacacatttcactcaggtgacactccctagctgaatagcagccagttcctctccaccaaggcccatctgaaaactcttttttgaacccacaccctttttattgttctctacaataatgaaaataatttgaaaggatcgcgtgctaaacttatctaaagtaacatgttactaaagacgtggcttctattcttgttagggatctaatgcatattttttcctaatgtttcctttaaggctctttctggcaaaggtaatgacatacgcatctgtgccagcatcccaagagtgaggctggtttctggaaatccattctgactctgtgacagcggggatggatgtgaccttgcccgtggttagaaaacaaatttactgagtaagtatctaaaatgataatgtaggctgtgtgcagtggttcatgcctgtaatcccagcactttgggaggctgaggtgggtggatcatttgaagtcaggaattactagcctggtcaacatggtgaaaccctgcctctactaaaaacacaaaaattagccgggcgtggtggcgggcgcctgaggtcccagctactctggaggctgaggcaggagaatcgtttgaacccaagaggtggagattgcagtgaaacgagattgtaccactgcactccagcccgggtgacagaatgagactctgtctcaagataaataaataaatataaataaacaaaataaaataaaatgataatgtaaaagatttggctgaaagagcaaacagagtgtttagaaaatacttttatctaggctcaacttaaattatcaaaggaagagaaactagatttggaatttattgtattctgagaaactttttgccttgtcctatatattttaggcatagccatttttaacctccactaatcaattccttataaagtcctggcagaaaaaattcaagacagataaagccacaaccgccacaaaacaaaatgtaagctacttttagaaactgttcctcactgaaattaaaattgaactaatagttattaaaatggctgagatgggattgcaaataaaatggaaataagatttgaaaaaatagatttaggggatataagtgcagttttgttacatgggtatatttcacagtggggaagcctgggcttttagtgtaactatcacttgaataatgtacattgtaccaatctgataatttctcatcccttacccgcttcctaccctccctccattcagagtcatctgtgtctattattctgctttctatatccatgtgtacacattattatcttataagtgagaacatgcagtatttgactttctatttctgagttagaaaataagattttgaccattaatgaaaaagtgcaatgtcaaaacaatattttaattttaaaaaattattacgtttgatctttatgtaaccttcagacaaagcacaatgcctgtagcatcttaagaaataaaggcagctggatgctaaggcaggtaacatctttcagaacccacataggtcaaattttagttttaaaagcagatagtccctgtttttcacttgcacagaatcaaagacagatagctgcttagcatgggtgaaataataagccagggtaaggagtttgggtaattttttctccatgttgattcccttcaccacctatactgtgctcagtgccaggtttcagagcaaataattaaaaagaaattttacataaactttttattgtgatatatatgcaaaaatgtatataaatatgtagctcaatgaattgtcacaagggaatacccctgggtaatgcactcagatcagaaaacaacattctagcaccgtgccctcatgatgcccctcccagtcactactctgccagaggttccctagcttctaatcttagtattgtctgtttttgatctctaatttaatgggatattcattgggggggaggagcaccatggggagaggcaagatgtggctgtgtttaaacaaaatttccaagtttgaattgagataatttcatttatataacagatacttttccaggtcattaaatattccttgtttggccaggcacagtggcttacacctgtaatctcagtgctttggaaggctggggtaggagggttgtttgaggccaggatcttgagaccagcctgcgcaacatagcgaaactccatcattacaaaaaatttaaaaataagctgggtagtctgggcatgttggctgatgcctgtaatcccagcactttgggaggccgaggcaggtggaccacttgaggtcaggagttcaagaccagcctggccaacatggtgaaactccgtctctactaaaactacaaaaaaaaaaaaaaattagctgggcttggtggtgggcgcctgtaatcccaactacttgggaggctgaggcaggagaattagttaaacccaggaggcagaggttacagtgagccgagattgcaccactgcattccagcctgggcaacaagagtgaaactccatctcaaaaaaaaaaaaaaaaaaattagctgggtgtggtggctcacacttgtgatcctagctactggaaaggctgaagtgagaggattccttgagcccaggagttcaaggttgcagtgagctatgattgtgccactgcaccctagcctgggtgacagagtgagaccctgtttcaaaaaaaaaaattcttttcttttttttttttgagacagggtctcactctattgcccaggctggagtgcagtggcacgatctcggcttactgcaacccctgcctcccaggttcacaccagtctcctgcctcagcctcccgagtagctgggactacaggtgcccatgaccacgcccagctacttttttgtatttttagtagagacgggggtttcactgtgttagccaggatggtctcaatctcctgacctcgtgatccgcccacctcagtctcccaaagtgctgggattacaggcgtgagccaccacacccggccaaaaaattctttaaaaaaattgaggcataatacacatgtagtgaagtgggcttatctttaaggtgcagctcaatgaatttttatattacagagtcctgtaaccacagcctagatcaagatattcatcacttctaacacctggaaggtgtccttactggtcaatacctactgccaccctaggggtaactagtgtttaatatagtggattacttttgcatgcttttgaatttgaattgaattatatatctcccctgtgaatccacttgattgactcatattcactgaatttgataggattccatttgaatcatataaacgtgaagccaaggcattcataccatgaggtaattttgtttgaaattctgaaaccacatgaataccaggacaaaattctaagctgaatgccgggcgtggtggctcatgcctgtaatcccagcactttgcaaggatgaggtgggaggatcaggagcttgagaccagcctggccaacacagtgaaaacccatctctactaaaaatacaaaaatcagatgggcatggtgacaagcacctgtaatcccagctgctcaggaggctgaggcaggagaatcatttgcacctgagaggcagaggttgcggtgagctgagattgcaccactgcactctagcctgagcaacagaacaagactctgtctcaaaaaaataaaaaagaaattctaatctgaagttctggcttggccatctgagattgcctcttttctattattctccctggaagccaaaaacatacacagtgaactagaccctgaggttttaaagtgggtttctagtagggtcccattaatgaagctaacggttaaggactcttctcagtaggtagtttggagggggattttcagtcccttggtcaaaatctcttagtctttagggactgaccattgactacagagacctgaatgaagtagcgtgaaaaagagcctctctagaggctggctgcttgagggccaagacatagtggtgactcaacaaatgcagggttatctcggaggagtctgccttagggattctggaagctgctggtagattcactcccaggcagagatgcctctgtccctcacatacaacctgacaatatgggaaagcagctaacctcttctttaatcttttcatcttgctcacctttccacacacataagagattattgttttgttttggttttgattttaaataatttcagatttagaaaagttataagaataggcccggtgtggtggctcatgcctgtaatcccagcactttgggaggccgaggtgggtggatcacgaggtcaagagattgagaccatcctggccaacatgatgaaaccctgtctctactaaaaatacaaaaattagccaggggtggtggtgcgtgcctgtagtcccagctactcaggaggctgaggcaggagaatcacttgaaccagggagtcagaggttgcagtgagccgagatcacgccactacactccagcctggcgacagagcaagactccgtttcaaaataataataatactaacaataataataataatacagaaattcctgttatacccttcaccccattctgtaattaagattttgctgtgtgtgtagagactttctttttctgtctctctgtctgtaagttgtgaacatgatgaccctttactcctaatgtgtatttcctaggtaatatacattttgtatgtgatcacaataattaactaaccacaatataatgatcgaaagcagggaagttaacattgaaatattattatctgatgcatagactttatttagatttctccacttgtttcaataatatcatttatgttcattccttttaatggtccaggattctaatccagtgttacatgttgtatttagttgtcatatctctttagacttctttaatttggagtatgttctcggtcatttttttttacctcttttaactttgacatgtatgaggagttcaggccagttatttttataatttgaatttttctgatttttcctcatgattagagtcatgttgtacatctcggacaggaatactacagaagtgatcatgtgtccttctcaatgtaccataccagaaggtacacagtgttggtttgtcacattaatggtgatgttagctttgatcacttgatcaaggctatgcccaccagggttctccactataaagttatattattactaagtatgttgtagagagatattttgagatcatgtaattaacctcaaactttcatccactagagttagtatccattaatgatgcttacgtgactcaattacttctaattatggttaccaaatggtgattttccaattgtgtccttccttctgtatttattgtagaagctttcccttttcttcatctggaggatatcagtacaaaagtcctatttgcatacaaaataggaggtgcacattagacacttacaaaactgtttaaaatgttgagttagaccatacgccaaaactcagaccttctgaatcacaaagaaaacatcttgggaaattgactagttacagagaaacagttgtcacatcatgtgacaaagtgatgtctccacacagacaggaaacatctgggttccactctgggccagacagatttctgcagtgttctcagaatgaggtattggcaactaagaagacaaagaaagaaactttcagaaacgtggtaaaactgtcaaaaccacatgacatgatctatatgtgctgtaaaacctaactcttaattttgtttattctgtgacagtgaatcatattatgtattttttaatgaagatggaaaagattagatgagcgaatatggtatggtgccttcaactgagttatacccaactgtgattgattttctgtagtttttattttctgtcttgatgaaacattcagtcaaggaagttagaaaatatatatgagaagtggaaggaattaatataaaaagaaaaattaacgatctaaaaaaggaaaaaggtaaagctgataaatctgattttaataaaagtcaataatatagataaaccattagcaaaccttatcaagtcaggaggaaatgaacagatatacaaattaggaatgtaaaaaggggaataaccatattattaagaaatatttttgtaacactttcatagatttcaaaggtggcatgcaaaagattttttcagaatacatatgtaaaacttccttaagaagagaaaatgaaaagatcaatagctatgaacgattaaaatacttgaaaaagttcctgtccaccatctcaactatcaggttagataggtcaattggtgatttcttattgagccttaaagtgacttccaagtaacacactattctttagttcaagaccagcctgggcaatatggcaaaaccctatctctgcaaaaaatacaaaaattatctgggcgtggtcttgtacacctatagtttcagctacttgggaggctgaggtgggagggtcgcttgagtctggtaggttaagactgcagtgagccatgattgtgccactgcactccagcgtgggtgacagagtgagaccctgtctccagtagatagatagatagacagatagatagatagatagatagatagatagatagatagactcttccagggaatttataaaggaatacaccattacccaacccttttttttttatataaagccaacattgttgcattgattccaaaaactggaaaaggtggcatttcaaaagaaaaccatagcccaaccttcttatgaatgtacatgtaaaattagcaatatgttaaataatgcattatgactgagaataaatttatcctgaaagtgtaagttcaatattaaagaatttactaatgaattttaccatgttaataggacaagggagaataccatagccgcctcatagatgggaaaaaagtatttgataaaattcaacatctgttctggattttaaaaaacataatgaaatagaacaatttggatactttcttaacttgataagacctatgtctcaagtgaaaagtcagtagcagacgtaatggcagaactctgcttaccttcccattcaagtgaacacccttccctgctttgatttgctttcctctagagtgcctgccagtgcagttaatcagggaatgaaataagaaacagaagtattggacaagacaagaaaaaactgtatttgtagatgaaataattgtctatcccaaaagctctggaagattaaccattatagttattaaggaagttcagtaagggggctggtttaaaatgactgtaggaaaatggattaatgacttttttctttttttcttttttctttttttttttgagatggagtctcactctgtcgcccaggctggagtgcagtggcgcaatctcagctcactgcaagctccgcttcccgggtccacgccattctcctgactcagcctcccaagtagctaggaccacaggtgcccgccaccccacccggccaatttttttgtatttttagtagagacggggtttcaccgtgttagccaggatggtctcaatctcctgaccttgtgatccgcccacctcggcctcccaaagtggtgggattacaggcgtgagccaccgcgcccagcctgatgactttttttattgcagtcagtaattaaaaggatgaaaatatgccatttagaatggtaactgaaaacacagttgactatccagtaacagatgaaagagaaaattggagtacctgtgtgaaagcataaaacattgcattttgagatgtatagaaagtcttgaataaatattgaagccttgttcttggattggaagactcgacaattttaaaaattgtcagtattttcttatatgaatggacaaattcagtgcaatgttaagcaaaatcttaagaagggatctctttgccccaaattgtaacagaataattctgcagtttatgttgaagatgaaacatttgagaatatctaggacatttatgaaaaataagtaacaagaggtaatgtgctagacaaagctttcaaacatacagcttcaggagatagaggctacgacctaagaggaagaataagttgaggtagaagatactgagttcacttttgtgaaaccacaatgggtggcaatgagagatctatgaactagtttgttttgttttgttttgagacaagagtttccctcttcttgcccaggctggagtgcagtggcgcgatctcggctcactgcaacctccacctcctgggttcaggcgattcttctgcctcagcctcccaagtagctgggattacaggcatgtgctgctacacccggctaatttttgcatttttagtagagacggggtttcaccatgtcagtcaggctggtctcaaactcctgacctcaggtgatctacctgccccggcctcccaagtgctgggattacaggtgtgagccactgtgcccggcctatgatctagttttaagattgtgactgagagcatccagatgatggtatctatatggtaaaatatggcttttgagttcaaatgttagggactgataagggtgtgtaagtcacaatcacgtcacaatgctgactgagatggtgcccatcagatggctgccatgctgctagaagagtgccggactgcagggcaatactgctttccaagattgactcttttttttttcttttttaaattttgattcttgctctgtcacccacactggagtacagtggtacgatctcagctcactgtaacctccacctcccaggttcaagcaattcttcttcctcagcctcctgtgtagctgggactacaggtgtgaccaccacacccagctaatttttgtatttttagtagagatggggtttcaccatgttggccaggcaggtcttgaactcctggcctcaagcgatctgcccacctcggcctcccaaaatgctgggattacaggcatgagccactgtgcccggcctgagattgactctttactaagaaagataatgattgaccttcatcttcaagtggattctccccatagttgcccagttttagggaggaattggggctgagggaggaagggaactttgtttttcacatttccttacttcatcaggataggtggcactgattttatctgccacacttggctctgtgtgcagatgggcatccccagtaggaaaaaatctgtttttaaataaaaaaggaaaattactagactaattttaccttgttgaaggaaatcgaagcaaatattcatcatagttctaccatatgtatccaattactgtttcctgccttcatattttagtctgtatctacagctggaggtgattttagtaatctacagctggaggtgcctgtaatcccagctacttgggaggctcaggcaggagaatcccttgaatccaggaggtagaggctgcagtgagctgagatcgcaccaccgcactccagcctgggcaacaagagagaaactctgtctcaaaaaaaaaaaaaaaaaaaatgtgcacagcaaatgttacattgctcttttagaaggcaaatctgtctctgagaggcagcaagactgagaagttataaacccaagcgccacagccaggctagtcgggtctgtatctcactgctgctgtgtgctagttcttcagctctctcaggcactacgtctttatgtagaaatggagtaggactcggtttagagggcagtgtgaggaataaatgagtccatatgaggaaataaccttgcacagtgcctaagttgagatcagggctcaataactacaagctaggttttttttttctatttctatcagtttctatgatgtgtcatagttttatttgttcttcctgtgtgtgcttgttttgatttgtcattattgtacattttgttattgttattattgctgttacccaaataaatgtataattatgaggctattggaaaagttagaaaatgaacacttcgaaaatgaaacgtaaattcctttcagtcccttcactcagagaaagcaatgttaatattttcatagattcggacttacataattttaaaaatagaattatgcttcacattgtatgttatgacttgtattttctgcttcaaaatacatcacaaatgcagttccaagtcggagtacaccactccattattattattattattattattttctgaggcagagtctcgctctgtcgcccaggctggagtgcagtggcgcaatctcggctcgctgcaacctccgcctcctgggttcaagcaattctcctgcctcagcctcccgagtagctgggattacaggcccctcccaccatgcccagctaattttttctgtttttagtagagacaaggtttcaccatgttggccaggctagtctcgaactcctgacctcagttgatctgcccgccttggcctcccaaagtgctggcattacaaggtgtgagaaatggcacctggcctccactactatttctaatgcctgccttgtgttccattctgtggctcaccaatatcagcctgccaatcttttaattgctgggacaggctaggtgtggtggctcacacctataatcccagcactttgggaggccagggtaggtggattgcttgagtccgggagtccaagaccagcccgaaaaacatggtgaaaccctgtctctacaaaaaaaaaaaaaaaaaaaattacccaggtatgttggtgcacatctatagtcctcctactcgggaggctgaggtgggaggatcacctgagcctgggagtttgaggctgcagcaagccatgatcatgccactgtactccagcctatctcaaataaagaaatagataatgaaaaaaaaataaattattgttgggacattttgattgcttccagttgttttacttttgtaagcaaaggtgagatgaacatccttgtacctttatcttttattttagcgagactaattagttccttgagacacattattggatgttgaagagtggtttaatgagtgtgcactctaaaaattctgatagggctgggcgcggtggctcacgcctgtaatctcagcactttccgaggccgaggtgggcggatcacgaggtcaggagattgagaccatcctggctaacgcggtgaaaccctgtctctactaaaaatacaaaaaaattagccggcgtggtggcaggtgcctgtagtcccagctactcgggaggctgaggcaggagaatggcgtgaacccaggaggcagagcttgtagtgagctgagatcatgccactgcactccagcctgggcagcagagcaagactccgactcaaaaacaaaaaaaattctgatataaattcccttcagaaagctggaatatcctgccctcctaccagcagtgtaagagatatgatttccatctttgccaatcttataagccaaaaagaccattttaataatcttgtggaaaagacttttactaaaaatactaccagaagcagaaactataaggggaaaatatcaacaagttgactattaaaaataaccaataaaacttgtttggtatttggaaactaataaacccagtttaaggacaaatgacaaataaggacaaatgttatactataaaaacatatttataacaaatatgacaaaggattaatagcctcaatatagaaagaacacttgtaaatgaatttttgaaaataactcaggaaaatcaaaagttaagagcataaacagattgtttacaaaagaaatgcaaatggccaataaatagatgaggaaaatatctttctccattggaaatcaaagaagggtaaaataataaataaatgatagggatactgagacacagatagactaagtaactcattcaacatcacacatcagtaaatggcagagcctgcatttgaacccaggttgtctggctcccgagtctgtttgacagcctctttctgttttcacaggtgaggaaacaggcctagagaggtaaagtgtctagcccagattctctcagtcagtcagaggaattacttagcttcaaacttgtatctgagtcattccttggctcagggagtgactcagacacaagggtctttgtgggagttccccctgtcccagtcccagaacagagccatcactcagctgtctcctgcacagcctctgcaggcttttccccctgaggccccaggcagtgtttggggaaggacgattggatgactcaccatgggatctgcttatcttcaggttctctgggtgccctgcagacctttggatcctgccaccttgctggacgggagggctctctagctcctgccagcccttagagccacaggaccttggtcacaacatctacagaaggccctgcagctaagtgtgagttactgttgagagatggagctgtgagtgcctgggcaggccaggttaaagacactgtccaggagaagggaacttgggatgaaaattcccttctgaaggaatcactcagaccccatacctcttgtcagagcaaagactcccacataaaaggaaatagcttcatccctgagccagaagctgagcaagaccaaacctgaagacgttactctttccagggactctccatggctaaatgaagggaggatggttggcccaagatccaggaagacagagtgaagggagaggtagggaggccagagtctcatggcgggtgcgataggcatgttctttcaggagaagggggcatctttctagcccattgcgttctgctatcttgtggtatggggtgtggcccatctgcttctttattcttgctggacctctctagacttgctctcccgtcatttttggcacctcacctggcctctaggaatgtgattagttcactccatcctgactcagaggcagaaatggccctggattctcagaatggtggtggtggcagaatttatggacctactgtatataattttgttttgttttgttttttgagacggagtttcactcttgccacccaggctggagtacaatggcagaatctcagaattacagacatgcaccaccatgcccggctaattttttttttttttcgagatgaagtctcactctgtcgcccaggctggagtgcagtggcacattctcggctcactgcaagctccacctcctgggttcacgccattctcctgcctcagcctcccaaatagctgggactacaggtgtgtgccaccatgcccggcttattttttttatttttagtagacacggggtttcaccgtgttagccagaatggtctcaatctcctgaccttgtgatctgcccgcctcggcctcccaaagtgctgggattacaggcgtgagccactgtgcctgtcctgatttttgtatttttagtagagatggagtttcaccatgttgaccaggctggtctcgaacttacgacctcaagcgatccacccacctcggcctcccaaagtgctgggattacaggcatgaatcaccatgcatggtcaattctctttttttttttttttttttttttgagacagagtttcgctcttgttgcccaggctggagtgcaatggcgcgatctctgctcactgcagcctccacctcccaggttcaagggatcaagggattctcctgcctcagcctcctgagtagctgggattataggcacgcttcaccacgcctggctaattttgtacttttagtagagatggggtttcactatgttggtcaggcttgtctcgaactcccaacctcaggtgatacacctgccttggcctcccaaagtgctgggattataggcgtgagccaccgcacccagccttttgtttttaactaaacattttatttggaaatttttttccaaaaaaaagcaagaatatttctgtggtctcctatgtattccttacctagattcatctatataaagccatgtttgcatgtcctctctttctatatacaaatatatatgtatatagataattatgttatatcataaatatatcattcctattctttctttaactacttaagactaacttgcagacatgatgctcctttacccataagtacttcagggtatattttctaagaataagaacttttttttatgtaaccagtagttttcaaaaccaggcatttgacactgattacaaagtcagtgttataatgatttaataatcatgataactagattaatgtagaccatagactagattaatccagtctacaatcagatgtcaactaatactgtcactttatagcaacttttctttcttgctttttcttattttttgagaccaagtctcgctcttgtcacccaggttggagtgcaatggcgcgatcttggctcactgcaacctctgcctcctgggttcaaatgattctcctgcctcagcctcctgagtagctgggattacaggtgcctgccagcacacccggcaaatttttgtatttttagtagagatggggtttcaccatgttggccaggctggtctcgaactcctgacctcaggcgatgtacccacctcggcctcccaaagtgctgggattacaggggtgagccactgtgcccgggcctatagcaacttttcttttctttttccattccaggatctaatccaggatcatatgctgcctttaggtgacacatccctttagtctcctttaatcaggagcagtttctcagtgttcatcttccatgaagtcgacatttttgaagagtataggtaggttattttgtatattgtaactcagtatggttttgtctgatgtctcctcattgattaggttcaggtatgcatttggggtgtgaacaccacagaagggatgttgtacccttcacagtgcattatatcaggaggcacatgatgtcttatatctcattactggtcacgttaactgatcacttgactaagtgatactgccaagtttttccaaggcaaagttacttcttttccttttataatcattaaatgtcttggggtgtggggcatttagatactatggcaaccatgctttatggtctatgctttatgacctatataatatttcaaagtatttgaaacaaataagagataaagggtatttatttgtttgtttatttatttatttaatttttgagacagggtcttactctgtcacctaggccagattgcagtagtgggatcatggctcactgcagctttgacctcctaggctcaagtgatccccccacctcagcctcctgggtagctgggactataggtgtgcaacaccatacctggctaattttttatctttttttgtagagacggggctttgccatattgcccaggctggtccctaactcctggcctcaaataaggtgtaagccaccacacccagctaaaagcatggatttttgtacaatatttacaaagggaatttgcaatttccaagacaggcctagctctttacactctgttctctgttctctctttctccatcttcttccccccacatgtctacaggtgtcagatctttttcaagaacagcagaaaatgatcgaataccaggtaagtatcacattaagtagcccagttttccttcctggggaaactgtcctagaggaaaaaaagggtgtgcattgtaagtatgtacagtttgtacatacaggctgggttctcagggaagctgactcatagatggagatttttctcacaggaggttgattaggcaggctcttagaacacctgtaagacagtgagggaagctggattgggctgagggaattgttgaacagaggccttagtggatcttatcctctggagctgggatggccttcagcattgttgtgaatggaggcaaggaggcttttatattctgaaatcaactaatcattgattgtaggctgccccgaggagggtagatatccttggatggtgcagtaccctttggccaaggataattctcagaaaggttttaagccggccgctaggggtagctcatgcctgtaatcccggcactttgggaggccaaggcagttgcataacctgaggtcaggagtttgagaccagcctggccaacatggtgaaagcctgcctctattaaaaatacaaaaattagttgggcatggtggtgggtgcctgtaatcccagctactcgggaggctgaggcaggagaattgcttgaacctgggaggtggaggttgcagtgagccaagatggcaccattgcactccagcctgggcaacaagagcaaaactccatctcaaaataataataataataataataataataataataataataataataaagggttttaagcctgcaagagcctcctttctatatgtagatacagtggcaagatacttaacacatactgctgtaaccaacatgttatctttattttttgtaaagatggggtcttacttaaaaccataccatttttttaaaccagatatgtaatgcttcatcgtatgcaagggaatatgactgatttgaccagtccctcatttgatggacatttgggtaattttcagacttgatattacaagtagtgatgcaaggaacattctcttttggattaccaatgtacaaagtggagagtccaagagtcagtaactgatcttcctggtagcccaacaaaaaggcaaatacagttagcccaagatttgtactgtttataaggaagaagcctattgttatctccagtggaaaattagcatttcaaggcagtttttgaaggtgttttccaagacgccttcttaggactgaagtagaaaagcacagcctctcacagtgtggtcccgggacctgggcgtctcctgggagcctgtgggaaatatggaacggcaggctccgcccctggcctgcttcatggggtgatttgtaggtgtagcctgggaatgtgtgtttaaaaggctttggatgatctttacgcacataaaagtatgaaaaacattgatagtgatagtagacaaagttcttaataactaataaatccgaaataggttttttatattgtttccccttggaatagagtgttagacccaaggcagaactcccagtttttcaggtgaccaaaactgccaagtgctagctccccaatgatacgacaatgttttctatctgtgtcaaagctgtaggaagtcctaactcttctgttgcttgcgatccacatatataatggaaggaaatgctgcatgtcagtgagaagaaagtgaaaatacaaatgatttctttctgttttctctcttttttttttttttgagttggagtcttgctctctgtcgcccaggctggagtgcagtggtgcaatcttggctcactgccaactcctccttccgggttcacgccattctcctgcctcagcctcctgagtagctgggactacaggcgcctgccaccatgcccggctaattttttgtagttttagtagagacagggtttcaccgtgttagccaggatggtctcgatctcctgaccttgtgatcctcccgcctcggcctcccaaagtgctgggattacaggcgtgagccaccgtgcctggcctttttttttttttttttgagacggagtctcgctctgtcactcaggctggagtgcagtggcacgatctcggctcactgcaagctctgactccctggttcaagcgattctcctgccttagcctcctaagtagctgggactacaggcgcccaccatcaaacccagctaacttttgtatttttagtagagacagggtttcgatggtctcgatctcctgacctcgtgatccacctgcctcggcctcccaaagtgctgggattacaggcgtgagccaccgtgcctggccaataggaatgatttctgtttaaggggtcagagggctgcttcaagtgtacagaagccctgaatttgatccaaggcagctgtagccttgatctggactgaggaacagatgtactgcccagcatttaaatgactgtcattcttcttatatgtgtgttctagtttggtagcaaacagttacacatcttattcctgggaatgtctcagtgtgaggtgttcccagcccccaagggccctgtgtcctgagaagacttctcctttccctgagtttctcattcctgcctcctcctccatcccttctcagtttcccatcacaggagatggtgccatcccatcgggcaggccgggaccctgagatttacccttgacttcctccctacttttccccctccttctacccagtcaccatgccgtgctaatttttaaaagttcagtgattctttttatttttttgaaacagggtcttactcactggagccttgaactcctgggctcaagcgatcctcccatttcagcctcccgagtagctgggactataggcgcatgccactatgcccagctaatttttttattttttgtaaagatgggatcttactatattacccaggctggtcttgagcttctgggctcaagtggtcctcctgcctcggcctcccaaagtgctgggattacaggcatgagctaccacacctggccacaacttcagtgattgctgcctcttcattcctgtgttctgtggaaatggcatggcttcctgggtgcagaattgtatcttttcctgggaaatattgacccagagcctgtcactgtgccctgtgatcagccctgactgctgctcttactaccctggtgtgttgttctggcatcagggagggtgtttgcttggcaccccctgtgcgctgtgccctctatgtgagtcttagtgtgtcatgtgccagcctccatggcccctgccctgcttttggtcctgcctttaggcccatttgcctgggctactactgctcaggtgctgctggaagcccagcattcctcatggaggtctgcagcctcctgagaatggggcgtgggcctgggctgctctcagagccacttcggtgcttctttccttcggccactcctggaggtggtaggccagtggccccagcactgcaatagagctacctaccctacttaaagcccactgcacaggcactgagtccccattttttgtcctttagaattgttttcctttctttttttcttttcttttgagatgttgtctcgctctgtcgcccaggctggagtgcagtggcacaatctcggctcactgcaacctctgcctcccaggttcaagcaattctcctgcctcagcctcctgagtagctggaattataggcatgcaccatcacgcccggctaagtttttgtctttttggtagagatggggttttgccctgttggccagggtggtcttgaactcctgacctcaggtgatccacccgcctatgtgctaccaccctggctaatttttgtatttttagtagagatggggtttcaccatatcggccaggctggtcttgaactcctgacctcaggtgatccaccctcctcagcctcccaaagtgctgagattacagccattaagccaccgctcctggccagaattgttttccctttcttacagatttcaaaatattgatttatatgatttttcttcttaaataaaataggcaaatttatataatggtattatgtgccaggcactgttcaaaggctttacaccttttaactaatttaaacctcatagtaattaagacacacatactattattatttccattgaacagatgaggaaactatggcacagagaggctaaatagttttcccagggtaggctgagctgatatttgaactcaggcagtccagccccaatccactgctttgcatctcatgttatgtggtcacatatagttagggagcagtccacaagaccctcacttctacaccaactgcaagtttgagggtctccctcaaaacacttttgggttttctaatttactagaaggactcatagaactcactgaaagctgttatactcattgttacaattacagcaaaagcatacagattaaaatcaaccaaggccctgtgcagtggctcacgcctgtaatcccagcactttgagaggccaaggcaggcggatcgcttgaggtcaggagtttgagaccagcctggacaacatggtgaaaccctgtctctactgaaaaaaaaaaaaaatacaaaaattagctgggcgtggtggtgtgtgcctgtagtcctagctactcaggaggctgaggcaggagaatcgcttgagcccaggagacggaggttgcagtgagccgagactgcgccactgcactccagcctgggcaacacagcaagactccatctcaaaataaattaattaattaattaagtaaaatcaacaaagagaagaggctcatgaagcagagtttaggagagttccacacatagaacttctgtcctctcctatggaagtcccaaacagtgctaaatcctcccagcagtaatgtgtgccaatacagacggagccttgccaaccaggaaagtgcacctaggccctggtgtccactttttattggtggttgatcatgtagaaaggcttgactgttcccaccactgacctcagtttccagcccttccaagaggttgagctgatgcctgtgacccaaagccctcattataaaccacatcattagactatctagtgtggcccaagaccactaggtaaacaaggacactcttaggacattccaagagtatagagattactttccaggagctgagggcaaaggccacacctctcttttggcaaggtcaaattctttaccacacagtcacttaaagacaggatcaccaggaccttcctaggctggtacccatgggtctccctcagtgactgtcctgctccttcacaacttatgctggcatctccagggctatcagctctttagagaacttttgttctctgtgcccataacccgaggcctgccaggcggtcaagacttcttcttttcagactattcctcctttggatctcctgctgaactcatcttctgctggcttcttaaatattagtgtcccttggagctctggcctgggcaccctgctctccccgtcttgcagaggaatctcacttttgtgctgatgctcagcattttagctccattcctgatcttgctcctgacacaaaacccacatgtccacgtggtccccaggcaggtccagcacaacagcctcctctttgttcctcatggtttcctcatctccaggtgtggcgccatcatcacccggttgccttcaagatacctgggtgttgccctgcccctaccctctttccctcccacaaccagttaaggtgcaggttctgctcttctttttgttttgttttgttgttttaatttttaaaaaatgtttgtgggtactagtaggtgtgtgtatttatgggcatatgttttggtacaggcatcatgcaatgtgaaattatcacaccatgcagaatggggtctgctcttctttacagcgttccatctttctctaacggttactgtcctgcttgtgaacatcacctttcacccaggttactatagggtctttcctctcacgtccctccaggtcacccaccacacttctctttccatccattgactttaaaactgcctgtgagtttacattgaaagtgcatctcttgtaggcagcatttttttttttaattcagtctgatgatctctgcctttttggaatgtttagtctgagacagagtctcattctatcacccagggtagagtacagtggcactatctgggctcactgaaacctctgcctcccagtttcaagcgattctcctgcctcagcctcctgcgtagctgggattacaggcacgcacaaccacacctggctaatttttgtatttttagtagaggtaggattttgccatgttagccaggctggtctcgaactcctgaccttaagtgatctgcctgcctcagcctcctgaagtgctgggattacagtggtgagccaccatgcctggcctggagtgttcagtttatgaaggggtgggttgcccctccacacctgtgggtgtttttcgttaggtggaacgagagacttaggaaagaaaaatacacaaagtatagagaaagaaataatggggcccagggtaccagtgttcagcatacggaggatcccgccagcctctgagttcccttagtatttattgatcattcttgggtgtttctcggtgagggggatgtggcagggtcataggataatagtggagagaaggtcagcagataaacacgtgaacaaaggtctctgcatcatagacaaggtaaataattaagtgctgtgctttagatatgcatacacataaacatctcaatgccttacagagcagtattgttgcccgcatgtcccacctccagccctaaggcggtttccccctatctcagtagatggaatatacaatcgggttttataccgagacattccattgcccagggacgggcaggagacagatgccttcctcttgtctcaactgcaaagaggcattccttcctcttatactaatcctcctcagcacagaccctttatgggtgtcgggctgggggatggtcaggtctttcccttcccacgaggccgtatttcagactatcacatggggagaaaccttggacaatacctggctttcctaggcagaggtccctgcggccttctgtagtgtgttgtgtctctgggtacttgagattagggagtggtgatgactcttaaggagcatgctgccttcaagcatctgtttaacaaagcacatcctgcacagcccttaatccatttaaccctgagttgacccagcacatgtttcagagagcacggggttgggggtggggttatagattaacagcatctcaaggcagaagaatttttcttagtacagaacgaaatggagtctcctatgtctacttctttctacgcagacacagtaacaatctgatctctcttttccccacaatttatattaaattacattacatataatctttattaaattacattattggtatggttggatttgtatctgtcattttagtgtctgttttctgtttatcccgtctactcttttgttcctctatttcttctttcctctcttttgttgtgctagtgtggatgaatggaacatttttcaaaattctgtttatttagatcaggcacacctcacattatgattttagtggttacttcagggatacaatatatatcttacttttcacagtttatttagagttatcattataccacttcacatagaatgcaagaagctcacctcatgccttctagaatatactttctgcatacacttcttcttggatggagtttccattgtcctaaagtccatcatttcttttttttgtttgtttttttttgtttgagtcagagtctcaccctgtcctccaggctggagtgcagtggcacaatctcagctcactgcaacctctgcctcctgggttctagagattctcctgcctcagccacctgagtagctaggactacaggcgcccgccaccacgcccagctaatttttctatttttagtagagacggggtttcaccatgttggccaggctggtctcgaatacctgagctcaggtgatccacccacctcggcctcccaaagtgctgggattacaggggtgagccactgtgcccggccctaaagtccatcatttcattgctggccgacctctgcatacttttctcttgttactaagtaacttgccacccctaaaatcaccgttttgccccccggcctttgttcccactgctcccctgcatagaatgcagttttccatcttcctgcggaggagagtcagctttccatatccctgggctctgaagcctaaccagaacctgaaaaatttaacagaccattcgcttctctgtatgccatagcctagatgtcctgccatcacagctcttgtgacatttttaccctgatggctttacatgttgctctctctgtgccagacagtgagctccttgaggtcaggacccatctatgactgtgaccccagcaacacacagtgggtcttcaatgtttgttgactcaaagtatggatggcaatggtagatagcttccaatgtgattttctttttccccaccatatataacacaaagccaagaatataaaaggccttccagatagataataagctctaacttataaacattataaaaatcagcaccatctcttgcacaaaattttttttttttttttttgagatggactcctgctctagcccaggctggagtgtagtggtgcgatctcggctcactgcaacctccgtctcttagattcaagtgattctcccacctcagcctcccaagtagctgagattacaagtgtgcaccaccatgcctggtgaatttttgtatttttagtatagacggggtttcaccatgtttgccaggctgatcttgaactcctgatcctcccaccttggcctcccaaagtgctgggattataggcatgagccaccatgcctggccctgcacaaacattttttttcgacatgactcaatgtcatttttgtttcaacagatacctgtgtcattcaaagatgtggttgtgggcttcacccaagaggagtggcaccggctgagtcctgctcagagggccctgtaccgggatgtgatgctggaaacctatagcaacctcgtctcagtgggtaagaacatcctcaccatacaatgcagattatgttcgaatgaccacctttcctttctcagttgctaaaagcaactggagtactttgggaggccaaggcaggtggatcacctgaggtcaggagtttgaaacctgcctggccagcatggtgaaaccctgaaaccccatctctactaaaaatacaaatattatccaggtgtggtggcgggcgcctgtaatcccagctactcaggaggctaaggcaggagaattgcttgaacccgggaggcagaggtttcagtgagccgatattgcaccattgcactctagcctgggcaacaagagcgaaactgtctcaaaaaataaaaaataaaaaaaaagcaacggaagtactctagaacttctgaaatatttatttaataattatctagcactttctatgtgccagaaattgttttagccactttaaaaatattaactcatttcattctcataaaagccttatgaggtagttactattagtaccacttttttacacatttggaaattgaggtacagagaggtgaagtaacttgcccagagtcacccagctagtagatagcagagtcaggatttgaacctcagcattctggcagcacagaatgcattcttaccttgtgctgctgcctcagtgggtgtggcttgagtttccatggtcctggattactaatcccatttggttctggacaaggtgtgtgtttagtcccctcccaagtataacatctattgtgcagcctttaaagctgcctgagaggccctgaagaccaaggagctcagcccaagacctgcatcaatttccccggaacaggttatgaaggcaccaaaccagatgtgatcctcagactggagcaggaagaagcaccatggattggtgaggcagcatgcccgggctgccactgttggggtaagtgtgataaatctagcaaaaggggtactgaaggaggctggcacctttggaattttgttcagcattcttctcttaaaagccttgaaagtcctccgagagcttcagccacgttaatgactcttcaacctccatgcaaccccaccgcccatatctgagtgtttttctcggctctacttgattgcacctctgcccttatgtgcttggtccatctctctttctccagaatctttcccatgcaggtattcttacaaataaaagcttctatgattctcctgttcctgcttcctattctctgttgtgacaaactttccagataaaatgcttcagagctacctgctttccctaatttctgcactcaaatttaaatcactcccatagacagatgactgtgggatcagagaagaggaagcagtgaattccatgttggggtggggaggtgtgaaggaaatggctgagctgggcccatcttaaccactgctgattaaccctcagactcactgcccctctcccttcagctctgtaagacattccagcaatatccattgtaccctgagggctgatggatggcccactcttagggatgcctctgaacttctgcttctggcgctctctggagtgtgttcctccattaaactgtgctcttcagctgtcctgagactgtggtatcccggttatcagttgccctcctcttcttttcttctcctcttctgaaaatttcgtaactgcaaattccacaagaatgtatctagtcagcctcccgtttttccagctactctgttactatctatttccctggctcaaacccagcattttccttccaaggaacaattgcattttctgttttccataacttggttctctttccagtggtgtaatcctctcaaagaactcacccattctgagagtacatgattctcacaaccagcccttttgccatgttgggcccttttttcccccttgcactgcccacccccgcatttaaccagtctgtggattacactacaggtgtgcacttaccctgttctttgtgtgtcaaaaactaaaatcatctttatttgtccttgctacccctgccacacacacactcacactcacacacacacacacacacgcacacacacacaccacttcatcttgcttattattccagggctttgctaccgtgtggtcattttgaatcttctgcctttaccactcactctaactgttccattcatatgtgtggttttgttgattttttttcttctgagaaatggctttaaatcttcctctctgctttttttttttctttttgagacagtgtctcactctgtcacccaggctggagtgcagtggcatgatcatggctcactgcagccttgacctcctgggctcaagcgatcctcccacctcttaacctcccgagtaactgggattatattcacgtgctaccacacctggctaattttcattttttttgtagagaaggggttttgcagtgccgctcaggctggtctcaaactcctgggctcaagcagtccacctgctttggcttcccaaagtgctggatttactggcatgagccaccatgcccagtccttctccacttttttttgttgttattgttcagatgaagtcttgttctgtcacccaggctggaatgcagtggtgccatctcagctcactgcaacctccgcctcctgggtttaagcaattctctgcctcagcctccggagtagctgggattacaggcacgtgccaccacccccagctaatttttgtatttttagtagagatggggtttcaccatcttggccaggctggtcttgatctcctgacctcgtgatccacccgccttagcctcccaaagtgctgggattactggcgtgagccactgcacccagccccacttttaattttccactgatatctcctaaaatgagacccagattatctcatgactgaatgtctttaagtgaggggttattaattatttttgtgccatggacttcttaggcattcttttgaaggctatagacctcacttctatgtataaaaatataataacgttcataagattataaaataaatgactaaagtacagtaattatcaaaataagctagaaaatagttatcaaaaaaaaatttttttttttttagatggagtttcactctgtcgcccaggccggagtgcaatggcatgatctcagctcactgcagcctcctcctcctgggttcaagcgattctcctgcctcagcctcccgagtagctgggactacaggtgtgtgccaccacgcccagcttattttctatttttagtagagactgggtttcatcatgttggtcaggctagtcttgaactcctgacgtcagatgatccacctgcctcggcctcccaaaatgctgggattacaggcgtgagccaccgcgcccagcttcaaaatattttcaaaatgtgcaatataatagtagatgtactttttcatttatacgttaatgaggcctagcatcaggtctaataactgtcatgatctcaaagaagagatgattataaacataataatgtgacatgaaaataacaatattcacaaactagtatcaagtcacaggaaccactaataccactgtgttttgttgcttatattcatattcaaaggaaatgttcaattgtagttggaactcagtgaaaacaaaaatgtaatttcttttctatcaaagttcacaagccccctgttttctgccaagttaagaactcttgcttaagtcctagttagctttgttgattttattttttaatctgtttcaccttagagtgctttaccgtttatattgtaactaactagcccaacatgatattcccttggatgactgctataccagtgcttgttaagctccaaggtgtttggaatcaccggggcatcttgttgaaatgcagagtctgattaagtaggtctggggcggtgccttagattctgcacatctaacaagctccaagtaaggccaaaattgccacttgaagacccacatgctggatagcaaggtactgtataacatttaaccttctttcttctgtaacagggatcagcaaactgtggcctaccgattggccacctgctttgtgaataaagttttattagaacacaaccacattcttacgtttacatgttgtctatattttcatggtatggcgggagagttgagtcattgtgacggagaccatatggcccacaaagcctttactttctgactccttaagaataagtttgccaacctctgctctgtaatatcctattttctttgaaattattggtctctatactctatgatatattgaattccatttgtgccagtgttcagaatcctctttactcatagaacactcttccctgcgtttgtgctttgggttatggttcatgttctctatttgtgtgctgtgcactctttaaattttgagagcatttcttaagtagtatgaagtttcataaggatgattcactgtactttctccagaagacatctggcgagttaatatccagaggaaaagacggcaagacatgcttttgaggccaggcgcagccataagcaagaaaacattgcccaaggagaaaagctgtgaatataataagtttgggaaaatatcacttctgagcactgatcttttttcttcaatccagagccctagtaactggaacccttgtggaaagaatttgaaccataatttagacttgattggttttaagagaaactgtgcaaaaaagcaagatgagtgttatgcttatgggaaattgcttcagcgtataaatcatggtagacgacctaatggagaaaagccccggggttgcagtcactgtgagaaagctttcacccagaacccggcacttatgtataaaccagcagtaagtgattctctcttgtacaaacggaagagggttccacctacagaaaaaccccacgtctgtagtgagtgtgggaaagccttctgctacaagtctgaattcattaggcatcagagaagtcacactggggagaagccttatggctgcactgactgtgggaaagccttttcacataagtcaaccctcatcaaacaccagagaattcacactggggtaagaccctttgaatgttttttttgtgggaaagcctttacccagaagtcacaccgcacagaacatcagagaacacacacaggagagagaccctttgtctgcagtgaatgcgggaaatcgtttggtgagaagtcatacctcaatgtacatcgaaaaatgcacacaggagaaagaccgtatcgttgcagagaatgtggaaaatccttcagccagaagtcatgcctcaataaacattggagaactcacacaggagagaagccctatgggtgcaatgaatgtgggaaagctttctaccagaagccaaacctcagcagacatcagaaaattcatgctcggaagaatgcctacaggaatgaaaacttaataattgtgggaaatacttgagcaaaatatctggtttcatggtatgtagggaattttttttttttttttttgagttggaatctcactttgtcacccaggctggagtgcagtggcgcgatctcggcttactgcaagctctgcctcccgggttcacgccattctcctgcctcagcctcccgagtagctgggactacaggtgcccaccaccatgcccggctaattttttttttgtatttttagtagagacggggtttcaccgtgttagccaggatggtctcgatctcctgaccttgtgatctgcccgccttgtcctcccaaagtgctgggattacaggcgtgagccaccgcgcctggccggtatgtagggaatttatccttaggagaaatcttatcattttaatgaatttgaacagtgtgtttttattttatttatttatttattttgagttgtattctctgtttcccaggctggagtgcaatggcactatctcggctcactgtaacctcagcctcccaggttcaagcagttctcctgcctcagcctcccaagtagctgggattacaggcacctgccaccacgcctggctaatttttgtatttttagtagagatggggtttcaccatgttggtcaggctggtctctttggctaggctggtctcgaactcctgacctcgtgataccccccaaccccccgcccttggcctcccaaagtgttgggattacaggcatgagccaacgcgcccaaccgacagtgttgtatcataatggaaatcatgatctaattgtgatacaaacttttctagaaaatactttctcaaacataagcatggacaccctggcatgtaaacgtttaaaaatgtattaaatggaataacagcagaatacaaaatatctgtgaagagacttaaaggcatactctggtatattccacagtgagccatacaatcagcattatttgtattttggagttgtaaatgtgaaattaacataaaatgtgaatatcagacacatgtcacacaacatatagaatgccattcagaaaacttttccactttaaatatcatcattgtcttttgatgtcttaacaatacaaaaaaataacaacaacatggcccactattgttaaaagaactttattataccagctacatttttccacctttttgtaatacatgtaaatggctatagaggttgttactgtcctctgcagaaataataaagcagtgtttttaaatgtatttggataatttggccaaaaattttactaaaatgtagttatttatattaaaaatgcaagctaaggaatagtttaagaacctgatactgggtaaatgaaacactgtaaactatttgacaaaatgtagtgtcaccctggtgtacagtacactgttcatattttcttagtcttgcttaaaatatcttgtagcaaattagtagcattgctacactattctagatacactattctatatacaggttgtataactcagaaatgtttcatgcgtagaccactgaaggagaatttcttttctctctatccctctgcaaattaattcaagaatattcatttttttcatataaatttccttgcaagtgtcctagacactaaatcccaaggttttaattatttcaatgtttggaaagaagtctgcttccctgagttgctatgtcatccatattagaaaataaatggccatgtggaatctacatttttcaagatttccctccatgtaagactgcctgatccagaatgagaaaggagacataaccacagatatcaatatgattttttaagtgataaaaagatacctcatacaactctaatcaacatattttttaaaaagaggaggtggatgcttttctaataaacttaagttatgaaaactgcaataagaagtagaaaacttggtaggatagttaacattgaaaaactcaaaaaagctattaaagatctataatgggaaaatgctccaggctcagaagagttcatgcttagttctatcttttaaagaaagagtaataccagtgttatttattatatggatgtaatacaatccatgaactgtactcatttattttattaagtcagaataaattttaacaccaaaatcaaatacagatagttgaaaaaagaaaacttctgctgggtgcggtggctcacgcctgtaatcccaacactttgggaggccgaggcaggtggatcatgaggtcagaagttcgagatggtgaaaccccatctctactaaaaatacaaaaattagccgggtgtggtggcacacacctgtagtcccagctacttgggaggttgaggcatgaggcaggagaattgcttgtacccaggaggtagaggttgcggtgagccaagatcgtgccatccagcctgggtgacaagagcgaaactccgtcaaaaaaaaaaaaaaaaaaagaaaacttcagaccagtcttactcatgaatatagaaacaaaaattatagttaaaatactagcaaatagaattcagccatatacccaaagagtgacatagtaagagtcatcccaagaatgccaaaccagttcagttaataggaaatgcatcaatcaaattaacagtttaaaggagaagaatcatatgaactctcaacagatactgagaaggcatttcatagaatgtgttaatttacattgtaatagatgggaaccacttaaagcggtttttcttaaaaaaaattttttttaacccaaaccccaaagcatatattatgccaaagccattttttaaaatcaggaattcaatattggcttagagattccagtgaaggcaataaaaagaaatgaattggtataaacagcagaaaaggtaaaactatccatttttactgatgatatggttgtacaccaataaatgaaaagactattttttgagttaacttttctaagaagacagggtaccaaaatcaagagctgttctccatactgacaagaaaacataatttatatgtacttcttttggaattacactaaatctcaatgattttttgacaatcattgaaaaaaatatatgaaaaaaatcataccatgtataaaaacatcacatgtacccaataaatatatacaacaattatatatctataataattaaaaatttttaaaatgccatgctagataccagaagataacatgaagccattctaatgaaattaatattgtattggcaaaggaacaggtaaatacatcattagaacacagtagaaaattcagaaatagacttcgatatatatgaactttttcatatgtgaaaaaggtgaaatctgaaaccacaggggaaaagagtagtttacttaaaaagaattctggaacagaaccttttaatcttaaaggaagaaaatttggattaacagcacaaaaataaattctgggtggctttaagacgtaaaattttaaagcaacagaattcttaaaagaaaatcaaaggagcctatgtgtacaatctaggagttgggagatattaactttaccaacacaggacactcagaagctatttagaaataagcagttgaaggctgggtgcagtggctcatgcctgtaatcccaacactttgggaggctgaggcaggaggatcacctgaggttaggagttcaagactagtctggtcaacatggtgaaaccccatctccactaaaaatacaaaaattagctgggtgtggtggcacatgcctgtagtcccagctacttgggaggctgaggcaggagaatcacttgaacctggaaggcaggggttgaagtgagctgagattgcaccactgcactccagcctgggcaacagagcaagactccatctcagaaaaaaagaaaaagaaaaaaaaaaggaaacaaacatttgactacgtagaatcttttggtacaatcttttgggtgacaaaagatgccatcagcaaactcaagagataatagattgtggggaaatatttgtaaagctgatcagagagaaggcattcatgaaatggacaggaaaaaaacccaatagcaaaatgtggcaaagaatatgagttgacagttgtgagaagagcaaatctaagtggccaatggacctgtccaaaaatgtttatcctcagtagtcactgggggatgcagatttaaagttaaaatcaaataacactgtgtaacagcatttttagctatcagaacaaaagatgttacacactgctggtggagaaataaattttgaaaaacaatgcaaattactgttttggaaagaaatctggtaatatttaggctgggcgtggtggctcacacctgtaatcctagcactttgggaggccgaggcaggcaaattgtctgaggtcgggagttcgagaacagcctggccagcatggtgaaaccccgtctctactaaaaatacaaaaattagctgggcatggtggcaggcacctgtgatcccagctactcgggaggctgaggcaggagaatcacttgaacccaggaggcagaggttgcagtgagccaagatcgcgccattgcactccaacctgggcaacagagcaaaaagattccatctcaaaagaaaagaaaagaaatctgttaatattattaaaatatttatgtcactttggagaatcttcccttagaagtaaaagctccaatacataaaagacagatgaacatgtgaacatggacatttattgtaaaaattgttcttaatggcaaaaaaacccccaaaaccaaagcaaacactagaatcaaagtaaatacccatcaactgggaaattgtagaaaggaaaaaactatagtgtatccattccatagaatgttaatatagccattaaggtggacaaattaaaactatgctagtggacttgagtggaattccacaatgttctcttgagtgaaaaatgcaaggtagatattaagtatgttaaatatgactccatttttttaaatcattaacaaaatgtctctaggtgtttgtcagcaataaacggtatctatatatgtttatttgattttatgtgcatgaagaaaagtatagaagagtatgcattgacttggagggaggtgggtaatgcaggtaggttatgggggagtcaggggtgtagggaaaaggaaaaccaaaaaagaaaaatacataaatgactgaatcacgggtgataccacaaatgtgtgagttagtaaatttggctggggatgggggagctagaattttgctaatttgtggggatgttcatggtatatattgtaaaaagggaaaatttcataataatgtatacgattctatttttaaaaaaagtaaaaactcctgtgtgtgtatatatgcatgtggatgtttatatgaacatagaaaagtgtagaagaatacacacgaaggtgttaacattcattggttaccttggtggagaagggtaataagttttctgaatacctttgcattgtcttgttcacatatattgcttttgtaatttgaaaaacaaaataaagggggaaaacatttcaaactgaatgaagccttgaaaatgtttccattttctgacaagatggcaccctgacttggtctagggttgaggttagggttatggaaatgacgtcttgtcacctttgctgcattctactagaaacaagtcataggtcccagccatactcaaagagaaggaattatacatgagagtaatttccttctccagactaccaggcagcagagatcattgggggccatcttggagtctacccacctcatcagcgaaacacttatttgaaactagggaggagtgaggatggcaactgtgttggaacagtagtttaagtaagccacatacttgctgctgggcaccatgagtgcacagattctagatgtgcttgctggaagttctccactaaacagaagtattcatttatccacaagtatatactgagtgcttactatgaactggacactgttctaggatctggggataaagcagtaaacagaaagaaatgttgataattgtcaagaagcaaaatgaaataggaggggagttaaattttagatgcagtaaccaggaaagccctcaaaatgatctctgcattaagacctaaagggaatgagagatgtaataatgcaactgtctagaaaattgtattctaggcagagggaacagcaaatgcaaaaatgcaaacaccctaagggaatgtgtctggagtgttggagaccagaaaggaaggtgtattcttgttgaataacaaattgtcccccaaacttagtgacctaaaacaacaataaacgtctcacatgctgtctatgggtcaggaattttgaaagtgccattggattcacactccccttagctgtgcttcttccctctcactctgcccttccgaagtctttgtccaagctatctctctttccagaccagcacacaggagggccagtgccatttgcgcttatgggaaggaaggagtcccctctgccatggcctttctgtgttcctccacccagcagtggaatcgaagctgttcagcaccttctccaaaatattggcgcccaatataccctaccattcaccaatgagagcaggttgcagaccactactgtctttctccgtctttcttttcctttttttttttttttttgagacggagtctcactctgtcgcccaggctggagtgcagtggcatgagcttggctcactgcaacctctacctcccgggtttcagcgattctcctgcctcggcctcccaacatgctgggattacaggcgtgagccaccacgcctggctaatttttgtatttttagtagagacggggtttcaccatgttggtcaggctggtcttgaactcctgacctcaagcaattcacccacctcggcctcccaaagtgctggaattagaggcgtgagcccccacgcccggcctactgtttttcttatgactagcactatattgatggagaggagatgcgggcagtggtttcctgcagaagtgacagcctcagagtggggttccaacagaaaggatggtagcaggtcattgtcaactgtgtatccctacctagaacaaccaaaaccttggggtcagaaaaagataggctgggggtattgtaggacacatctttgaaaatggtcgtccccagggagaaacagctaaatgggtgcagctacctggtttcaccgcatagacgcaattaattactcagcatctcacactataatggggcgccctgggcatttagctacacagcggaaagccacacctgagtgtgtgtggcagccttggggcgaggtggagagggttgttgcagtggccctgccgccacagaaggagagatgtcctttgaggaaaccatggcaatgtgtggtcttgcggagagatggggcttaggaattggatgcaattgactgaaaatgggaagtgggtggcaggaatggggtttaggaattgggggaggagaatcagttctgggatgtagtgataaagaggtccaaggaatgattgcatgcagatacttggttttcaatgattcaggagtccagagaaggctataattggtatgggtgtcccagtgggtcaggtatccgaggtcttggaatttgggagagtggtagtctctgggatatgggatgtggggagtctaaggagtcaataagggatctaaagggttggtgataggtgacttctttattgtggtaaaatacataaataatacaatttaccatttaaatcactttaaagtgtataattcagtgacattattacacttacggtgttgtgcaaccatcactacaatctagttccagaaatttttcatcaccccaaaaagaaaccctgtatccattaagcagtcacttcccattcttcccaccccttccttccccaaactcctggcatccactaatctgctgtctctagtctctaatgatttacctattctggatatttcatataaatagaattacacagtatatagcgtattaacaaactgtcctcaaagttccttcatgttgtaacatgcctcagtacttcattcctttttatgactgaataatattccattgcatgggtaataccatcagttggtggacatttgagttgcttccaatgagaggattatctgagtattgtgaaatgtactgctatgaacattcttgtacaagtttatgtttaaacaccttattcaattattttgggcatatacctagaagtgaaattgctggattatatggtaattctatgattaacttatgaagaaataaccaaactgtgttttttttttacagtggctgtacctttttatattacaaccagtaatgcacaagggttccagtttcttcacaacctcgccatccatcatttgttataatcatgtgccacataatgatgttttggtcaatgagggaccacatatacagtagtggtcccataagattatagcagagctgaaaattttctttttataaaattgtatttattattattattttttttccaacttttatggagctgaaaagtttatactgcctaatgacattttgatgatcctggcactgtgtgtacctaggctaatgtgtttgtgtcttagtttttaacaaaaaagtctggaggctgaggcaagagaattgcttgatctgccctattaattgcaattttcacagttaactagtactatttttatttaaataatattacctgggaagcggaggttgcagtgagttaagatcacgccactgcactccagcctgggcgagagagtgagactctgtctcaaaataaaataaaattaaattaaaataaaaaaattaaaaaaatttttaagtagaagattatagaataaggatataaagaaaatatttgtgtacagctatacaatgtgtttgaagctaatttattacaagagagtcaaaacatttttaaaaattaaaaggtttataaagaaattatagtaagctaaggttaatttattaccgacaaaaaaattcaaataaatttagtgtagcctaagcatacagtacatataaagtctacagtagtatacagtactgccctagccttcacattcactcaccgctcagtcactgactcacccggagtaacttccagtcttgcaagctccatccacggtaagtgctgtataccggtatacgatttcttatcttttataccatatttttactgtaccctttctatgtttagacatgtttagatacacaaataccattgagtataattgtttacagtatccaggcaatttggatttgtagcctcgaagtgataggctgtaccatcaggctacatcatctaggtttgtgtatgtacactctataatgttcacataatgatgaagtcacctaaccatgcattactcagaaagtatccacagaattacacaatgcatgaccatatttacattctgctttttaaaaatcttaaattaggctggatgtggtggctcacgcctgtgatcccaacactttgagacaccaaggcaggcagatcacttgagcccaggagtttgagaccagcctgggcaacatcgcaaaaccccatcccaacaaaaaaatacaagaaattagctgggtgtggtgatgcacacctgtggtcccagatactcaggagtctgaggcaggaggattatctgagcctggagaggtggagtctgcagtgaaccataattgcaccacagcactccagactgtgtgacagaatgagaccctgtctcgaaaaaaatcttaaatttatgtatcttaagaatatacattaatatagagtttaaatatcaaataaagagggttttttaaagttgaaacaatgtatcagaggataaaaaaccataaaacatttgtttaaatttaaaggatttgtttaatctgccctattaattgcaattttcacagttaactagtactattttttatttaaataatagtatgtatgtaacagaatagtaaagatgtaacctgtggatgctgttttacagcagcagaaactggaacacatgcagtctcatgattgtcctactcttttgccagatcattgcattgtctgcccaggcacccctcatcccatctctctccatcccttttcttaccttttcatgttccttgtcttttcatgacagcatttatcaatgtctgaaagtagaatgttgttgattgactctctcttcaactagaacataagcaatgagcggcccagcctttgtcccacacactgcagtgtgtcccacttctaagaaagtgtccaacacacagcaggaactcagtcagcatttcttgaatgaattaagtgaagtgatgcatacaggccacattctgagctgctggaggagccagtagttgattaccaaactctagtcctttatcttggtgtcctgatgtcctgactgatacacagtttgtaggcaaatagctggtggggtttagtagtatgggatagaataaagggagatgtaattgggacactctccacattatctgcccccatgaaaagctagttccaggtgttgccatctctgccccacactgggcttgccttagtcctcgttcccgccttttccagacagcagtgctgagaagcaggagcccctgagcttggagacgcaggaagagccctgggaggcccagatcaaagggaggcagtcagctcatggagccgaggaatgttctgctgacacccaccccgagggtatccggtatgtttctgtgcaccagcgacccctccacacctcaccagattggttccccagccccgtgggacccaattccgggtcaattccaatttgattccagtccagaatcaaatcagaagagcaatcccgagtgcccacctcacggtctgaagcacctcctcctacacccggacccaaacacgaggtcggctcaaggaggcactgaggtcacgacagtcagggtcctgcgctgcttgtcgcatgcagtctccttccccgaaccgccgcctgcacggcctccactgttttcctattgggctgcagcctgagagccctgacaatgcggcccacaaaccgggaacgcgaaagtgcacgtaccaggcgcgatcaccaggcgctagcgctgaggggggactcgcgtcacagtaaccgccaccgttgccgggggactggccccagcggcttggcccccaggcgtctgtggcagtgcgtcccctctccgcgggatcgtcgccatggtcctgcgatcctaggagtcgggcaaggccgaacctgcctgaagaaacctcaagcggagattcaaggaagcaccacgtgatccctaaggatcccaaagatgcgtcgggcatgcatgggcggtgtgagggtgcgtctccctgacaggtgtccccgctgggatttcgaggtacggcctgcctgtgttccccggggcgctctctttccggaggggtttcctggcagagagcagaaccgcgcagcctcaggagctgcctggctgtgtgtgtttctgtgcgactgttggatgtttccgtgtgtctttctgtgtgtgcgtgtgagtgtgtgtgtggtgtgcggtgaaagaaatgtggctcgtgcagtgaagcgcggtttctctgtagttcgcctacgctctgatgcgcccgtctctttggccgggcttgggttgcggggcaagcgttctttgtttcgctcttggttcctaaagcctcggtgaagtggggggctggctgcgacccgcaaacgtccaaatcacctcccctcccaagccgcccactcttccagaaagaagaccagcacacgacaaccaagaacaaattcctccaggggcccatggtcctgcggcacacccaaggctggacggaccctagctgtcctgtcctcagtacccccttgagcccacttctaattcggtggctggcggagtcgcagcttcaggacctgaggcgggcactccttcatcctcttcagatttcattctggattaaaggatgtgtgcagaaaaaaggtcagatgggggtgaagatacaatccgctgaggtgtggaggaggtctcgcaccttcacctgcagaacaggtgcagacagatgtcaaagaaactgtttccaacgccatccccttttcctcttcactgtacaacctgtccacaccatggcgctgtgctggcgatagaagacacgagtgttcggagaacctttggaccgaagactgtcgcctttctggccaggtcccctgttggaccctggttccccgaggcacatgggagtgggatggattgatcctgcctgggctgcggcctctactctgttctccctcttttcttgccttccctgattctcgtcggcccaggttttccttggtctggctcacagtcctccagaacgtccttcacagcaaatgtttcccagttcgtccaggaccaccttggcggggacgtaggtgatgagtgtttccttctcaacactcacatttcttaatgactgggtagctgtgatgctcttggaaccgtgggtgcccgtagctttccccaataaggaaactcttggtctccccattgcatcagatggctgcatgattcacatagaatgagaggtagccagccgtagctggcctttgccttctaatgaaggctatgtttcatctcatctgctggtgttttctcattgttgaggggtctcccattgctctgttcctggctgggactgcctctcagcactgcaccttttcgttgccagggatttcacggagcaaaagggactgggggttagctgggtgtagacccggtggtgggttgtgatcccggtgtgggtgctggatcactttgcaggatcctcttggctcctctggcaggaatccctggaggaggcttggactccggcacaggccctcctatggtttcaggtgtgctttgcttgtgcttcgctttcttgggggtatcctcagtggccctcgccagcatgcctggatatcccttttgggcttggattcaccccagaaggcctctgagacactctctccacattttctgcccccatgggatgccagttttaggtgttgccacctctgcttcacatcgggcttgactttgtccttgttcccgccttttctggacagcaatgctgagaagccgaaggccctggtcttggagaccaggacagggccctgggaggcccaggtcgaaagggggccagtcagctcatggggcgagggaatgtcctgctcacaccctccactggggtctcaggtatgttttcctaccccagcgacccctcaactcctcaccagattggatccccagccccatgggacctgattcctgcccacaccctccaatctagaatcaaatcagagagcagtcccgagtgcccacctcaaggtctgaagcgcctcctcctccacccagacccgtacacgaagtgggctgaaggaggcactgaggtcaggactgtcagggtcctgcgctgctggtctcacgcagccttcttccccgggccgcagccagcacggcctccaccgttttcctatgggccctgagagccctgacgttgcggcagcgccagccgggcacgcgaatgcgcatgcgccaggcgcgcgtcaccaggcgcgacggctgagccggggctcgcgtcacagtgacagccaccgttgcctggggacgggccctagcggcttggcggagctggagccctccctggcagtgcgtcggcgctgggctatggccccctcctctccgggggatcgtcgccttggtcccccgaccctaggagtcgggcagggcagaaccaggctaaagaaacgtccagcgtagcttcaaggatgcaccgcgtgatccctatcggatctccccgacgcgtcaggcctgcctagacggtgctgggagcgcgtctccttgaacgttgtcccgcctgggattgcgaggtaggtaccgcctgcctgtgtgtaccggggctgctgtctccggggaggggcttctggcggacaggagaaccaagcagcctcaggagctgcctgggtgtgtgtgtttctgtgcgagtgttgcatatctctgtgtgtgtttctgtgcaagtgttgcatgtctgtgtgtgtggggggggtggtgtctggtgaaaagaatgtgtctcgtgcggtggagcgccgtttctctgtagtccgcgggctctcttatgcgccctcttgtggtcccaagtgtgcttttcttgtttttcgctttcttgggggtcattgatttcagctctaagcttaattccttttctgagtctcacctgtttctttaagtgggaacttaaaccattgatatgtatttaaaagcatacatttccctcaaagtgctgctttagttgcattccacaaaattttatatgctgttatttttgactccaaataggtaattttttacttgtcccatagtttacttaaatgtgtgttgcttaatttgcaaacattttttaattttgacattaatttctggcttaattctactgtggttagaaaacagattttctgatttcaatccttttcaatatattgacaatttatggctcagaatataaacaagcttgctaaagttctttgtataagtgaaaacactgctgctgctcttaggtggactagtctataagtatcaattacaacaagttggctattagcaccgttcaggtatcttatatctttatagattttctatatacttttaaaagttaatgagagaacagtattaaaatctcaaaatatgattctgagttcatttatttttatttctagcagtttttaatgtattgtttagttctggtactaggcacaagtacttgtatgattgctttgtcttcttggtcaatacacttctatagtattataaaatatgcctttttagaataaatccctggtaatattctttgtttcaaagacaatttgttgtgagggccgggtgcagtgggtcatgcctgtaatcctagcactctggaaggctgaggtggtgggatcacttggagtcaggagtttgagaccagcttggccaacatggtgaaaccccatctctaccaaaaatacaaaattagccgagtgtggtggcgtgcgcctgtagtcccagctactcgggagggtgaggcaggacaatgacttgaactcgggaggtagaggttgcagtgagccaagatggcaccactgcactccagcctgggtgacggggtgagactctgtctcgaacaaaaaaagacaatttgttttatgttcacatagccattttggtatagtgtttgcatggtgttttttttttttttttaacttttaacctatttgagttggtatatacttttgactttttaatccgagtcttcatattttaatctttttttatataacctaacatcttttttttttttttttttttttttttttttttttttttggagacagtctcgcctttgtcacctaggctggagtggagtggcatgatctcggctcactgcaacctccacctcctgggttcaagcgattctcctgcctcagcctcctgagtagctgggttacaggtgcccaccaccacgcctgcctaatttttgtatttttagtagagatggggtttcaccatgttggccaggctggtctcaaactcctgacttcaggtgatccgcccaccttggcctcccaaagtgctggcattacaggcatcagccaccacgcctggctttcttctgtgtttttttactgaagtatttaggccattaacattgtttgtaattattgatatatttgggtttgtaacaatcatcttgctctttattctgtttctcttatctatccttaattctttttctaattttctgcctatttttgtattttttaaattatattctattttacttctactactggctaaatattacggcactttttagaattttgagtgctttttttcctagaggctttcaacattcatttttagctttcaatgtctagttttacatattataccctatcgtatatttgctgggatctcacacaaataatacttccattccaccttctcacctttgagccattttcatattttaattgccacaaatattaccatccctatactacattattgattttgcattaaaaactcaattactttttcaagagaatatgaggaaaacaatatttactcatatttaacttttctgttaatttccattcgtatgtatgaatccatgtttccatctgcatttgttggtgatgaattctcttaccattcatttcttttttcatttgaaactattattttagggtcagggagtacacatgcaggtttgttacattggcaaactgcatatccctggggtttggtgtacaaatgattttgccacccacatagtgagcatagtagctgacagttttttgaccttcacattccttccaccctccactctcaagcaggccctggtgtttattgttcccatctttgtgtccatgtgtactcaatgtttagcttctacttataagtgagaacataacagtatttgggtttctgatcctgcatgccttcacttaacggcctccagctgtgcccatgttgctgcaaagaacacaatttcttttttccctgaggctttagctttcatttgtttataaaagttttcacttttttcatattattaccaagtgcagaaataccagatagagtttcctccctattcctttctctgctagcttgcatagattctcacaaggagtttatgaatcttgttacttttgtccccatgtatgtatcttttttccatcaggctgttctcaagattttcctttaccactagttttcagcaatttgtcttgtgtttagctttgagttccttgagcttcttagatctgtggctgataggttccaaaaaatttggagtattttcaaccattatttttaaatattttttctgccttctccccgcttctcagactcacatttacatatatctttatattttcccacagatcaccaagactcttttacagtgtttttcccttgttgtacctgagttagagaaaacgccacactttgagacgaattaagagtccatttattagctggcgaccgagagacggctaacgctcaaaattctctcggcccgaagaaggggctagattttcttttatactttggtttagaaaggggaggggagggtctagttaaaacaattttacagaaataaagtaggcaaaaagttaaaaggataaatggttacaggaaattaaacagttccaggtgcaggggctttaagactattacaaggtgatagaccgggggctttgggcgttatcaatcagatgaattcctgggaattgcagatatagcttgccacagtatcttatcagttaattgcattcttggatgtgctgggagtcagcttgcacaagttaagtccttgaggaagcggctgccagtgaaagagccaagatggagtctgtctggctctcttagctaagggagagtcaattcaggtggaaacaaggctgggtaattaaaggaaaagggagagtctaaaaacagggttagtaaaaacaaggttgggcattacattccccacttgtgtttttggggaatcaaatcgttgattcctcaattataacaagggggttatattgagtattaagatacataagtttgacagaagctatgcattcttttacaaaattaagaaaccaattttatatacaaggcccaaaaattaaacttaatagtatgatgaggagaggtccagctaacccagtgattaaagtagttagccaggggttccagttgaacatgctttgataccaggggatgttgttttctcgttcctgttggcgcctatctagattttctcgaacttttggagtgtatcttttatgactaagaatggtggaggaacagttaaatcaactttgttagggggtttctggaacatagggtcacctagatcagttaaaggcccgattggcttgggtgggctccatgagaccaggattttttggatggtgaacatagtcccaacatcaaatcctgggatataaaatcttaattcccatgacatgccataatactactgagttgaattagggtcatggacagttatagtaagaggattacaattttttctagtacataatttaggacgagaagcacgagttatggaatgaagatctggttgatcccccagagtaggtggctaaagttacacatgtccaatcagggcagaaaaactggtaagtatctcgacagctagtgtcagggtgattcccaggacagaggtaaaagtcaacattttggagtcctttttctgcacctttggagcttccacatccagtttggctcctggagtgtccaaatcctgctgcaaggttgacacttcctgcttttgggaccggcagattgtgttgctcttcgcgggtacgggctggctctgggaacagtacacataaatcaactgcaaaggagacttccttggaggtactggccctccaagtggtgtttgcaaatacacatcctgttgtgaaagaggtgaggagaaaggagtaggaaggcgcaaaggacataacaggcaaaaacaaacaagtgaggtagataaaaagaattaatctaatggcttcacctgacttaggtgcagttttaaaggggcctgacccaggcctggggacccatgtttctagttgggctctgttggcctttttgatgcgggagtgatgaatctaagcaggaatgccgtccaccttcagagccattggcgttgtgaggatgatggtgtgaggtcttttctaagcaggagtgagtgcttctttctggaactttttaacaaacactaggtctcctggctggaacgaatggcaggaccctgtctggtcaggaattggattcggatgggttccttgaacaagtggcaggatgatatcttgtacctgttggggagactgtaggtactgtaataaattcttttgtgatatttctgccaattgggcatctcttagcttaggcaagataggcggcgccctcccatacatgatttcaaaaggtgagaacctagcctagtaaggggtgcaccttactctaagtagggctaaaggaaggagacttacccaatttacacaagtttctaagattaattttgtaagagtgttttttagggtgtggttcatgcgttctacctgcccagagctctgggctcgataggcacaatggagcttctattgaatgtttaacgccttactgaccgacagaactatagacgaggtgaaggccggtccattatcagaccctatggcagcaggcagcccatatcgagggatgatttcattgagtaaaaacttaactaccaagttggcggtttcgtttttggtagcaaatgcctcagtccatccagagaaggtgtctactagtactagaaggtatttgtacccagcctggtgtggttttacttttgtaaagtcaatttcccacttctctcctggcaagtttcttcggagacggtggcctgggctgggtttaggaccttgtttggcatttacctggtcgcaggttgttccccagagagctgcttgatctgttaggctttgaagacgggggattcttgtttttgatagccttttctgctgaggtgagtagcctgcgctcctggcagatggctccatgtacatgcaccgtagcaaaggcgtacctgctgtcagtgttaacgttaatatccttaccccatcggagagcctgagtgagggcgatcaattcagctttttgcgctgaggtgtttgctggtaaagcctgagcccacaacacatctgtctccgtggtaacagctgcaccggcctttcgtactccctgctcgagaaagctgctaccgtctgtgaacacggtggcgtccgccttctctaggggcacatcttgaagatcggatgggccagtttcggtagtttccaacagttcctgacagtcatggatagtagctggatttaaacaccgtgtggaagagaaagtcagtttactgatctaacagtaaactctgatattgcaagatgcgagcatttgacatccattcgccagaagcactttgaagtaaagtctctatggcatgaggagccttaagggttaaattttggcccagagttaacttatcagcctcttggactaggcttgctgtagcggctactgcttggctcgcagacaacttggccatccagaggtctcaggatccagtttcttagataaataggctactgggcgtctccagggtcctaaggtctgagtaagcacccctttagcaactccctggctttcatggacaaacaggtgaaacggctttgagatattagggagggctaaagcaggggcttcagttaatgcctttttcaggtttcaaaaagcctgttcttgtgtgtctgtccaaattaacgggccatttcattctgtacctcttggatagccgccactaagatttttgtttgtcatttgaatgctttatcagcagccttttcagctgcctgtgttgctcgtttttgtttttcaaactcttggttgtcaaaaaccttttgggctatttctaaaagctgactgatattcattccagcaaatccctccagtttttggagttttcttttaatatctggggctgcctgagccacaaatgccaaattaagagcatggctattttcgggggccgctgggtcaaaaggggtgtaaatctgataagcctcctggaggtgctctaaaaacggtcctggtgactcatcatgcccctggatgacttcattcgccttagacaagtttatgggtttccgagcagctcccttaatacctgcgaggagataccggtggaaatcatccaaagctctccctccacttgaggaatttgggtcccaattaggccgggtagagagaaagacctctgtgcacatttctgaaaatcttttctgtatatctccttcctctctggaactctgtcctgcaccagccagcatgtctctgttatcttcttaacacagtaagaacttcatgttgtttgggatcagctttctcattatccagaatgtgtctccaagtagaaagtttgtgtgactattgcacaacttcactatatatatatatatggagagagagacagagagagagagagagacagagagagagtgtttcactctgtcacccaggctgtaatgcagtggcatgatcacagctcactgcaatcttgacctccctaaattcaggtgatcctcccacctgtctcccaagtagttgagaatacaggcatgcaccaccacacctggctaacttttgtattgtttatagaaatgggttttcactaacttgccaaggctggtctcaaactcctgcgctccagtgattgccttggcctcccaatatgcgaggaatacaggcatgagccaccacacctggcccacatgattctcttctgtcagggatcacagtcatacaaaccaattattccatcatggctccaacagaagctcatgttttttgacactggtgatgtcactggaaagaaacactctcacacattattggtgagaatgtaaattgacattttcaaaagtaattgggcatgatctattaaaatttaaaatgcacaaatacttttgacttggcagtataatcagttgtaatatattctatataaataaaatccaagaataaacatataaagatatttattgcactagtttgcagaaatagaaaactcaacctgaatactcagcttatggggaatggatagagtatatcatggcattgctgttactaggttgctacatgtaattctgcaggcattttgaaaaagaaaagcaaggtgcacaagacaaataccaacaaaatataatgtacagaccttatttaaatctggactcaaaccaactattattgtgaaaggttgacttatctgttcaagatacatactgaaaatatttagggggaaaaggtatatagcatgctggttgtctttaatatatcccagtgaaaacttattgggagagaaaacaagaaaggcaaaaatagggtgattattaaagaggttatgggtacactgtactattttatttttgcccatgtttaaaattttctaaagttaaaacaaattaaagtgacagatatatttgcagttatcctattatagtatactgtcaccagactgaaatgacacccacacttgagcacagaagaaaacatcaaaaaataaacacgaaagttttaacagcagatgagtgcaatacaatgaaggtggtttttaaaaatttttttagctgggcgtggtggctcacacctgtaatcccagcactttgggaggccaaggcgagtggatcacttgaggccaggagtttgagaccagcctggccaacatggcaaaacctcatctctaccaaaaaatataaaaattagctgggcatggtggcaggcgcctgtaataccagctactcaggaggctgaggcaggagaattgcttaaacccgggaggcagagattgcagtgagctgagattgcgccactgcactccagcctgggtgacagaatgaggctctgtctcaaaacgaaaaaaataaaaatataaataaaaataaattttacactatttccttggtataggataaacttcgtatgtaactttgtaagataaatgtaatgattttttttttttttaggatagagacttgctctgttgcccaggctggagtgcagtgacacgacttggctcactgcaacctctgcctcctgggttcaagcaattctcctgcctcagcctcccgagtagctgagattacaggcatgtgccaccacacctggctaattttgtatttttagtggagacggggttccaccatatcggccaggctggtcttgaattcctgacctcatgatccaccagcctcagcctcccaaagtgctgggattacaggcgtgaatgtaatgatttttaaaaagaaaaacatggatgtaaagaaagtaaagcttcgttttgaacagttatgatggtaacaaaactcaaaggagcaactaaagcagtgctgcaaccacttttgtctgtcttagtaattctgattagtgtacattcctcccccaccaaccattttgagagaaatttgtctgaaaacatgatttatgaaataaacataagtgctgaaagagttaacagttattaagtttcttcttttaaacaatcttgtaacaacagaaaaagccttggtcaggtatggctcatgtctgtaatcgcagtactttaggaggccaaggcaggaggatcacttgaagcccgggatttgagaccagcctgggcaacaaaataagaccctgtctctacaaaaaaaaaaaaaaaaaaaaaaaaaagaaagaaaaaatttaaattatccaggtgtggtggtgcacacctatagtcccagctacttggaaggttgaagcaggaggatcacttgagcccaggagtttgatgctgcaatgagccatgccactgcactccagcctgggtgacagagagcccacctctaaacaaaaaaagacaaaacccttataaaattgatctagacaatgatggagtgtagaggattgtaaaaaccttggctacagaaattgttcctctctagtgtagtccatgactgaagaacagaaaagcactatatcatccatcaaatttaaataactgacataatgcttaaaatttccccttaccatcattctttatggttaaaaagaaattctgcaagtgtgttcacaagccaaagatattaataagcatacagaagagaaaggattaatggtcaggactgggaaacaatgggttaaacaaaagatagtattttctttactgcaggtcttctcaaccttttaatttggtttgttcagagtggaattcacaatgccagtaaggaaatttggttatgcactgtatcatatgcaatgaggtagaacccgctctacgtattttgggaattatttcttgaacatatttttgaaaagtctggctcaagatattgtctgcaaatggcagttaatatgcaagtatgtttgatggtagaagggcacctaacagtctactgacatttaacttttcctttaaatttataattttgcaattatgttaatctctcaattgttaatgactgaataatgaaggcataacttatccaatctgaacaaaatgtactttagagacgaagaatgcatgagtgttgtggcatcatggtggttacactgattattcagagttctaatgattctcagttaccacttttttttggacaatagtttgtaaaacagtgaattaacatttagattataatcatacactatatacaatcagtggtttccagagtgatgacaattcagtgggctgcaatgttcattaaagataatgtaggccgggtgcggtggctcatgcctataatcccagcacttcaggaggctgaggcagacagatcacctgaggtcaggagtttgagagcagcctgaccaacatggagaaaccctgcctctactaaaaacacaaaattagccaggcatggtggcacgcacctgtaatcccagctacgtgggaggctgaggctggggaattacttgaacccaggggtggaggttgcaatgagccaagatcacaccactgcactccagcctgagcaacaagagcgaaactccgttttttttttgtttgaaaccaaaaaagataatgtattagaagacaagagataacactgcatatagaaaaggtaagtatttcttggtaacatttgtttttctatgaacagctttgtatacagtaactcaattttgaggtcttgagttctgtgcaccagatgcttggaatcatagaagaactgtaggcattgattgattgctgctccaatatattattctaactcaccttcactcactgaacaccattaacctcttctcaccatcattaatttctgaccatcagccctcattcaacaacattctaattaacaagttcaaattatttaaagctgtttttatctgtcatttgcgtccattatgtactaatgtattacatttattgtcactatagtatctgttccttaaagcatagaaggaaagcataattcatgtattatatttttcaaaatcactgcatgcacaaacatatctggtaattaactgttaactggcttttgagtgttttacattattcagaaatccctgatagaggtcatttaggtggcttaaattaagttgaattcaaattaaatttggttaggattttttaatggactgaaaacatactgtttttcctatttaaaataatggggccaaataaaaataatacaaaccaaaaataaaataatggggccagatgtggtggctcacatttgtaatcccagcacttctggaggctgaggcaggtagatgcttgagcctagaagtttaagaccagatgaggaaacatagtgagaccccatctctaaaaaaatttttttttaaatgagctaggcatggtgatgaacagctatggtgacagctacttggcaggctgaggttggaggatagcttgagcctaggaggtcaaggctgcagtgagctgtgattgtgccactgtactccagcctgaacaaggagagcaagaccctgtctcaaaaaaaaagaaaaaaaagacaaaaagaccaaaaaatggaatgtagcctccgagatctgggtctctaaaaatttaccattcagtatatcagaaatgggttagattcaaatgaggaaaaactgtagttggtaaattttgtttatatttccatttaaggcaaatatatattttatacacacacacatatacatatggaatatatatatggaatacatatgtggaatatatacatatatggtatatggaatatatacatatatggaatacatatatgcatacatacatggaatgtatacatatgtggaatatatacacacgtggaatgtatacatatggggactatatacacacgtggaatgtatacatatgtggaatatatacatgtggaatacatacacgtggaatatatacacatgtggaatatattccacatacacacatgtggaatatatgtatatattccacatacacacatgtggaatatatgtatatattccacatacacacatgtggaatatatgtatatatatggaactaccttggccatcattttgttaagaaattctttttcccttaaagtaacaatcagaaaatgtgggccaaaaacttttgcttttggaatttgttgtagaaaaataatctttcactttcttaaaaaacaaaacaacaaaaaacaacagccctaaagcaatttttggaagtttcttcctggtgtggattatctgatgctcagaagtccttcatacctttactatactttaaaggttttgtctaaaataaagtatctgttgttctaaaggggctacatgataagagaatggttgcatctttttactgtaatcataaaatattcccaccatttgagttctctaacagtatgtaatgatgataatggcaatcattttaacaacaaatatcagatgctatcgaaagggaattatatgtatttaattataatttagtcattgtaatacaattacagtattttacaaatagaaaagaacacacaagaaatatataggatttcagttaggatatggtgaaatggagatgatgcttaataaaggatataattcagcattatattctagcgtttatagagatgttaaggaattatttaaggggtttctgaaattattctgcatccatgttaatgtaggccttctaagaatgagcagattctgagcagaagcaagatgttctacattcattatagatatgaaatagatgaagattttcttaaatttaatcacattcaaggctttctcaattatgaagccttgtatgttgagtaagttgtgaaggacatctaaagtctttaccacactggacacatgtatagggtttctcaccagtatggatcctttgatgcagagtaagttctgagccacgactaaaggccctcccacattccttacattcatagggtttctctccagtatgagttctcagatgttcagtaaggtgtgagccacgaataaaagccttcccacactgtttacattcataaggtttttcacctctgtgaattctctgatgttcactaagttgtgagccataaataaaggccttgtcacattccttacatttgtagggcttttcacctgtatgaattctttgatgatatgtaagttgtgtagcacgtacaaaggtcttcccacattccttacattcataatgtttctcaccatgaattttctcatgttgagtaagatatgcaacacgaataaaggcctttccacattccttacattcaaagggtttctcacctgtatgaattctctgatgttcactaagttgtttgccacaaataaaggcctttccacattccttacatttgtagggcttctctccggtatgaattctttgatgttgaataagattagaattagaaataaaggctttcccacattctttgcatttataaggtctctcacctgaatgaactctcaggtggtaagtaagttgtgagccacgaaaaaaggtcttcccgcattctttacattcatagggtttctctcctgtatgaattctctgatgttcattcagttgggaggcacataaaaaggctttcccacattctttacatatgtaaggcttttcaccagtatgaactctctgatggtatgtaaggtgtgaaccaagaataaaggcctttccacattccttacactcataaggtttctcaccactatgaattctctgatggtaagtaagttgagagccaagaataaaggccttcccacaatccttacattcatagggtttttcaccactatgaattctctgatgaagagtatattgtgaacaataactaaaggcttttccacatttcttacattcatatggtttctctcctgtatgaactctctgatgttcagtgagctgtgaaccacgaataaaagctttcccacatgcgttacactgataaggtttttcattagtatgaattttctgatgttgaatgagatcagaagtacgaccaaaggcctttccacattccatacactcataaggtttctcaccagtctgaattctctgatgttgaatatagcttggctttttgctaaaggtattcctgtgtttcttaacttcagagcatttttctatattatgattttcctcatgttgaataaggcatgacaggtagctgaaaccttgtctgcattccttacatttgtacaatttttccttggtaggaattatccgatgaaaagtagaagaggttgaatgactttcagtggccttttcttcacaggtaattttgacacacatgtaaagcccttcctgacttgcttcttgaccctctaagttgcctttgcactccatattgtctccaagaccattgtattgaaggtgatggttgatacgtttccccatattctcccactggagtgattccatttcataaatttccttttctggagataactttttggtcacacaactggattccaagtctgtagaataaaaagaaagcaaattcctgcttttgtttacaaggagaaataaaaattctatggtaaaaatgatagatgaaaataattctcattaagaatagaatggcttaaacagtacagaaatattttctgccatttttctttaaaggcacaaggagagaataaagaaaaaggagagcttataggaaagaaggtaattagaaaaataggttaagtcagtggttctcaaactttggaatggcttagagacacccaggaggcttataaaatagtaataaaaacaccctcttgaaaacaaacagatgtgtagctggacatacaatctatcaacaaatcctatcagctctcctgtcaacattaagaatctgaccacctctactaccaccatcctaggccaagtcacccctctctcattgtcataacctcttagctggtttctctgctttcatccttgcttctatgatctattcttcatacagcagccagaggaattcttttaaaatgtggtttatataacatgatttcccctgctaaaaatcttccctattaatggtctgccatctcaggataaaatccaaagtccttaatatggctcacaagaccctacacaagcttgcctgtggccacttttcttatgtcatctcccactttggccacttttctgatatcatcacttaccactcccctaattattcatttggctgtggtcataatggcctccttggtgttaaaaaagtgtcaagcatatgcctacagttttgtctttagaatgcccttcctctagatacctgcatggcttgttccctcatttcagttttctgctcagctgtcacattatcaaaacatccaacacataattgtacctatattgcatttttcactaatggatataccatttctaaagtttgactattgtctgtctgtcccatgcttaatcaaagcaagggctttgtttcatatactgctttatctctagtgcctaacatcattacttacacattgctggcattcaatatttgtcaacaatttctaaaatatatatgttccttcattcataaatctccttagatgcttctcataaaacacaaagtttgagaatagagctaataatctttcaatggtttacccttgtatttagaataaaatccaaactcctattcatggcctacaagcccctttacgatccagttctttcttaaatttctccaatttcttcaacgtaccttttaagcctcaaattgagccactactatcttcagaacaatgctctaatcttattggcctgatttaagttccaagaacatgtcaaattctttcccattttagattttccatatgctgttccatctgccaagaatgctctcaaagtggccacctcctttgcgtgtgaaatgtcctagcttaaatgtcagctgctcagaaagactatcctggatcactttaattaggtccatgccaggtattttctatacctgtaatttattcctaattcttgtttgaatttttgcaattctaaaatttcatttatttatctgttgatctttctgctcctcaagctctacatgtgtagggggaaaatgcctgttttattatatagctagtccccagaacacagtatacatataatgttttattcctttaatatagtttttcatgtcttactttccaatatttattacttaaggccaaatgttcttatatttcccaaagaagtacctcaaaatctcctagaaatagtgacaagtttacacaataaagatcttatattattccgaagaaagaagttgagaaacaagtgtacttttcaaatgcagagaaacctatctgatgtaactggatcagcaggcacagggtctctgaccactgtatataggctgtagaataacaaagactggtcatgggaagaaaaataaatacacatcagtaagctcaaatttaaacagtcttttagaaataagcctccaaaacttgagaaaacacacttttgctgaaaagcaaaaagaaatgataaaaacaaaagcaactacccccccccacttgccatatacacaccacagctcagtttaacaccaattcatgtcagcaacacatcctagaacaagatagaccctgcttttgtttctttcatagaagaacaatatggtttataaaacactgaaagaaatcaatgggcttatggtgattaagggaacactataaggaatcaaataaattcagttgggacccaaaatagctacctatgtgctagtgccctaataaaaatgggaagaaatattaatctaatatgattctggggtaggaggcactatgagaacacaggatggtgctaaacagaaatctagaggaatatagaaaaagttaagattagaataccaaagtctcagaactgtgcccagaatgaggagtacatataaaaatgtattcaattaagtagcagctctttttattgtcattaaattaatgaaaaaactatatggtgaaaaaagggaaaactgcaaaaggggtgatgagtgaagacaacaaaatggagtctgaaaaggaggagtcattttaggaggtttcttttattcttgcccccatcaagtcctactgaatatatctcctaagtagctctcgaatctgttaccttatcaccaacaccactgctgacactcgggaagcccaaggcatcttttttttttttgagatggagtctcgctctgtcatccaggctggagtgcagtcgtgccatctcagctcactgcaacctccgcctccaggttcaagcaattctgcctcagcctcctgagtagctgggcttacaggtgtgcaccaccatgcctggctcatttttgtatttttagtagagataggccttcaccatattggtcaggctggtctcaaattcctggcctcaagtgatccacctgccccggactcccacagcactaggattacaggcatgagtcactgcgcctggccccaaagcatccggaaccacaacaaaaacctactcagtaatgttatgagaccctttgttctaatctccatctggcagatagaatggaatagtaaatatgaaaatcacattatgtcaccatcttaagatttttcaatagcctgcaaaaattggagggataaaatctaaactcttctgcagtatttttcaaacttcttttgactaaaatttcatagtaagaaatacatattatgactgagtacacacactcaaacataaaacaaggatgtcataaaattatctttgctatatgtattatatattcatattttgttattttatctcctgttttattaaaaacaacaagtgctgcttataacctactaggttgtattcataacctctagcaggttctgcccggcctggctccagtcaacctctccgactcccttgtggcacctctgcctcactaggctccagctgcaaaagccttctctcaatacctcatacaaaccaagctccatcctcctatggcctgcagtacactgttacttctgctaggaatgctcttccctcttctctctatcctcagtctccttacctgtttttcattctttcagggctcacctgaaacttcatgtaccattgcacttcctgagaagctgtccccaatcccaggctcctagcaatgctgttccagtaatctctcttctgtaagacagccactccacccactgcagtctacaaggaaagcctccatagctgtggtaagacctccacattctgctattaaggctggcttctccacagagatctcaatttccataagctcttagtgtaatagccttactatccttaagttataaaaagaataaccacccaccctcccctaaaagaccactagaggccaatcctttaatgcctgacatctctgggttatctcaattaccttaaaagctttggtttcctgggtccttggtcatcactaggactcttatcccatccatgtcctacttcactccaaactatgccttttggaattcacagtgtactttctacaaatcgtctacaacctctgccccgcctgtgattattttcttcaccttcttgatccttttgaaactttgagcacactacttggccagaaacaatgttttccttcatgtctttccctccacctcgcttcacctaacctctcccaagatagacataattatagcaagtcaacaccaactcaaggaatcagatatacaaaaaaatatactcaatgttaatttttctacaaatattcctaatcatgacatttaccatcatagaactaattgtattctgtagtctctttggagcaactctaattcaaactgtaattgttactacccaatgagaaaaccaaacagaatgattaaacacaggactttcatttcctgttgtatacactgattggctctttacccctactcatagaattaatctatatctaaaacaccatggattcattaaatatcttaataacctactactgaattcaaatactaccaaacttctgaatagtctcctataaatagaaggcattatagcattcatagtaaaaacaaaggaaaaacaacgaaaaaacccacccctttatatcctccatctttgattaccaaaagcatatgtagaagccccaaatgctgcacccacagttcttgcagccacattactaaaattaataggctgtggtgtaatacaaattactctaattttaaatctactaacagtatatagcctatttctaatatcactatgaggaataattataacaaattctatttgttcatactaaacagacttagaatcactcattgtgtattcatctgtagctcatacagcattactaattatagcatttctcatccaaatgccatgaagttttataggagccctaataactgcccatgaccacacaacatcaaaatgattttgccttacaaattcaaactacgattccaggcacggtggctcatgcctgtaatcccagcatgggaggctgaggtgggcagatcacctcaggtcgggagtttgagaccagcctggccaacatggtgaaactcccagctctactaaaaatacaaaaattagacagggatggtggcaggcacctgtaatcccagctacttgggaggctgaggcaaaagaatcgcctgaacccaggaagtggaggttgcagtgagccgagatcacaccactgcactccagcctgggtgagagagcgagactccatctcaaaaaaacaaaaacaaacaaaaaaacaaattcaaactatgaacaaatccatagccaaaccatacacaaggttccccaacttatgatacttagacttaagatttttcaaatttaccatggtaagaaagcaatacacattcagtatgctccttgacttaccaaggggttacacagaactacttacaatatttttgacattatccagaagtaaccccaacatatgttgaggagcatctgtactactagctcgcagactacagacattacttcctttaacagaaacatgataagtatgggctagcctaactgacctagccttttgcaacaactttttggctcctaaggccaacagattgcatctaacctttaaaagttcagaaagctatattgttacatatgaaggcatgagttagcagttgatagccttactatcaactattaaccagaatggagaattattttaaattatatctttttttatgatctaattttaccattatccaaatagactatatggccataattagtacattagtcctatctatcaatcacatcacaatgagaaaaattcacatatcacattaataacatcaaaccatcattcacatgagaaaatactctcatatttatacatctcctacttctgttacccctatcacttaactccaaaattattctaggacccatacactgtaaacatagtttaaataaaacattcagttgtcaatctatatagaagcttaaaactctttactgtagttcccccttaccaaggttttactttgtgtggtttcagttactcatagttaactgaggtccaaaatattaaatggaaaataccagaaataaacaattcataagttttaaactgtgtgccattctgaatagtatgatgaaatctcacaccatcctactccatcttgctcaagacatgaatcatccctctgaccagcatattgtctaattttgccattatccaaataggatctgcctattagtcaccacccagtagctatctcctttatcagattcaaaaaacacataatatatatggctcagtactagctctggtttcaggcatccactgggggagccttggaatgtatacgccgcagataagggggaactgctgtttttgctaagaaagtatgcaagaactgctaactcatgcctccatatataacaatgtggctttctgaacttttaaaggttagaagtaatctgttggccttaggagccaaaaattggtgcaacttcaaataaaattaattaatttcttctgttcttctatcataattttacttaccaacttatttttaccaattactataactatttacaaaaatactcatttgccaccagcctatttccaaccctaatatttattcattcagggcaagaaataattatttcaaactgacattgaatgactttcaaactttaaaactgacactcagctttaagttagactacgtctcaataatatttgtactagtagcttctttcatcacatgattgattatagaatcttcaatgtgatacatactttcagatctaaatattaatcagttacttaagtacatacttatattcctcaccaccacactaatcttagctaatgccaccaacctcttccaactcttttttttttcttccaactctttattggatgaaaaacaacagaaattatatcatttttacttaatggatgataacacagcctaacaaacacaaacatagcagcctccaggcaattctatataaaagtattggagatactggattcctattattaacggcatgattgttatactcaagcatttgagaattccaaaaaatttccacactcaaccccaaccctgacactgtctaattaggcttctcctggcagcagcaactggtgaatctgcccaatttggttttcacccataactgccatcagtgacagagggctcaacactagttttagccttacttcatttcagcacaatagctgtaacaagaattttcttattaatacacttttatctactaattgaaaataaaacacagtggggtgcagtggttcacaactgtaatgctaggactttgggaggctgagtcaggaggatcgcttggacccagaagtgcaagaccagcctgggcaacacagtagacacagaccttgtgtctacaaaaaaaaaaaaaaaaatccgccatgcatggtggtgcacaactgtagtcccagctactcaggatgctaaggtgggaggatcacttcagcccgagtgtgaggctgcagtgagccgtgactgtgccactgcactccagtctgcgcaacagaacgagatcctgtttcaaaaaaaaaaaaagaaagaaaaagaaaaaagaaaataacaaaactgcttagctgctattactactttattcacagcaatctgtgccctaacacaaaataacattttaaaaaatcattgccttttccacctcaaacctaggtctcctaattgtcactagtggcattaatcaaccacatttagcatttcttcacatctgtacacatgtattcctgaaacatatactttttctatgctctggatccattattcgtaccctgaatgatgaaaaatattctagaaaactaggaggcctatttaaaactatactctttatgtctttactcatttttagaagtctacacttaatagatatgcctttccttaaaggcttctactccaaagatttaattattaaaaccgcaacgtatgctaacacctgagccctttaaatcatgcttattgtcacctccctaagagctgtctatagtactcaaattattttctttccagtcctgggacaaccctgcttttcaactttaactcaaatcaacaaaaacagccccctccgagctaattcaattgaatgtcttgcaatcagtattattttcactaaatttttttatctccaaaaatattattcccataactattccccaaatgactatgccactctacctaaaactcttagctcatgctttaactaccttaagtttcattataacattagaactcaactaataacataaaatcttaaatttgaatcctcatacatacacaaattttccaaccttctaggtttcttcccaacagttgttcatggtttatcaccatacctaaacttttcaacaaacctaaacatagcaccagttttagtagatatgactagaaaaagtcactctaaaaatcatttctaacttccaaatgatagtttcaataaccatctcctaatgaaagtattttcttctccttccttatctcacttttactggctatactcctagctatctaatttcccagagtaatctcagtaacaataaagataccaacaaataaagatcaactggccacagccatgagtcggccttcataactatataatgctgttatacctacagaaacttcctgaagacgttcaaactcttcaccctcaaaaattacccaatcctttacattttcaaaatcaaaaatcacctccacttcataacctgttattcacataattataaataactctatgaacaaacctaacaatacaacaccccaaataacaaaactagaacctcaagtctcagagttctgaagctgatgttccacttaaactataacctgactctgctacttgagaaaaattattgttaaatgctatgtcagtactgagaaaataaaatctaactactttatggatgcattatgtgcttttcctgataataatgtactagtactattatgcttgattgtacattgtatatacatgtgtaatcatacattaagatccactccccatgcatataagcatatacatgaaattacaaacagtgcttaacccattgaatggcatacccacatatgtcagatttaccatacaaatactgttcaatacattaaatccttatattttacataggacatgaaattattgattattcacagtacattcagtcaaatcaatccttgacaacaagcttattaccgccaacaggatttctttagtactaagcttcaagaaaccagcaacttgcttgagatgtgtcccacttctcgttctgggcccatgaaacttggatgaaactatgcctgccatctggttcttacttcagggtcacggacttaagattgcccattcattcctctttaataagacatcttggtggactaatggctaaccagtccatgatcacacatcactgtgatggtgtcacacacttggtattttttaatttagggaatgttgtgatccaacatggctgtcacggacttgatgcaataaagcaaactgtagctgagctgaaattgaatagtctttctctacactgaaaccataaagtgttaattactccatgttcggtggacatagtaaaaaacatgacacaaacatatacacacaatttccgttaattaactccacaatctcaagctattgtagtatttgtggatataaggcttttattcttgccaaacttcaaaacaggaaatcttgtatttattaactacaggtaaggcatacatgcatacacacacacacacacacacacaagttcatctagaactaagttttagcccaactcctaaagaatttatcaaaatccaaaaaataaattaaaaattaggctttctgggttaaaagtttgttttttactaaatttactaaaaaatccaccaataatgacacagcatttaaacttagccattttttcttgagagagaattttccacatataagctaatgtagcttaattcacaaagcaaggcactgacaatgcctaaatgagttcatataactctataaacaaataggtttggtcctggcctctttattcatttttagtaacacttgcaactatctgcattctagtgagaatgtcctctagatcaacaaaaataaaatagagcaggcttcaagcacactaattagcagctcgtaaaaccttactctaccatacagccacagaaaacagcaatgataaaaattaagcaattaacacaagattgactaagttatactaattttccttagggtttgtaaaatttcatgcttgcagtcatatgactaacccaaattaacaaaacagcataaaacatgtttttaacaaaactcagcataaaacatgtttaagattataaacaaagttataccttaactaggtcataaaaagctacagctaatataaaaataaactatgaaagtgatttaatatattctgaatacatgatagcaaagacccaaactgggaagaaataccccaatatgcttagccataaacttaattaaattaacaaagttattcactttgttaattcaccagagtaactttgttaattcaccagagtactaccagcaacagcttaaaacacaaaggacttggcagtgcttatatccctttttttttgtaatcaataaaccccagtaaacctcactatctcttgctaattcagcctatacaccgccatcttctgcaaaaccttaaaaggtactaaacacaagtatttacataaaacgttaggtcatggtgcagcttataaaacagaaataaatgggctatattttctaattaaagaacattccatttacaacaaacttaatgaaatttaaggcgaaaggaaaatttcatagtaaattaagaacagagagcttaattgaatagggccatgaagtacgcacacaacctttcatcaccctcctcaaatatttcaatatatccaaatttataattaacataaatttatatgaggtaaatcataacaaagtaagcatactatatgctttaataaaccaaagtgtttattaaaaccagcctacatctggaaggtttcatattgatttgaccactttgaaccaaacctagccccaaatcaacagaacctaacaattatatttatttagaccaaaacatttactcacaacataaagtataggagaagggaatttcttcaggtgctacagaaaaagtatcataatgcaaagatgaaagaatattaaggacaaaaaaagcaaagctaatcctttataccttttatgtaatgaattaacaacaattttacaaagagaactttagctaaaaaccccaaaaccagacaagctacccacagactaactcatatatgtagcaaaatagtgagaagatccatgagtagaagtgaaaatctggtgatagccggctattcagaacagaatttcagttcaactttaaatttactcaaattttaatcaatgtaaatttaaatgtaactctaggggggcactcaagatggctgactagaagcagctagtgtgcaccactctcagggagaggaaacaaagtcggaagtaaatactgtctcttttaagtggatcatctaaaacagggatccccaacccggagccacagaccgtactgtttggcagcctgtggggaaccgaactgcagagcaggaggtgagcagtgggcgagtgagcatcaccacctgagctccgcctccggtcagatcagcggcagcttgagattctcataggagctcgaaccctatagtaaagtgtgcacaggacggatctaggttgcgggctccttatgagaatctaactaatgcctgatgatttgaggtggaacagtttcatccccaaaccagtccgcccttcccctctcgccccactccccacggccagaaatactgtgttccatgaaaccagtccctggtgccaaaaaggttgggatagcgctggtctagaagaccatgtcaggatttaccacggacgccagggaactcacagagaacagagagacaagccaggcagccaccttcctgggactggcatggagtgggagaagctccctaacatggtgaaacggtgagagagtgagagtccctggggaagccacacttcccacatggccctttgcaatcctgggcacaggaggaacccccaactcccatccctgggccactagaccaacacagaaagccacctagagtttttgcagaggcactgctcaagcccatgtggagcaccacaagccccggatccctgagcagcttggtgccagctgccataaccccagtggaagccgcagtcacagtgctgaggggcggtcagaatgcccagcccctcctcgccaggaaaggctcggcttcaccctgcccccgcctgagctccccagcacagcgaccctgtccccacctgaactctgcaggcaggcacagctccacattcccccaggaacctcccagatagcagaccatgcaacccctgccctacctcctctgaggcggctaaggctcttccagcgcagcaaccgcacctctgcagcaaccgcacctccgcctaaactctggtggcctgaggttctgtgttcctctggggcagaactcccagaggtaacagataacacttggcacctctgtatgccctaaacagtgaagttcggcattgtttggaagggagggaagggcaagcgcgccacgtgctccgcagctgtcagtctccattgcaggagtcctgctccagtgaaaggcccacagcacagccgccctgcccccacctgaacatttcacctgcagcccagagcccttctgaaaatccaaaccccacataccgtgatattcccttgggctcccaccacctaagtgttctgtaggaccctgcatgagagttcgaccagtgacctggaaaccaacctgtcccacctccccacatcatagccagcacctgaactctgggctagcccgactgcagtccagccccttcaggtctcacacaggttgtccagtgggccagctaggggcctggggggaactggggaactacttgccccattccaactctgctggcgcctgaccatttcccccagggcctgaggtcagaccaacccaaccagctgacaccagcacaacacccattcacacaggccctgtggaggaagccccttctacaggaagcagcagtactgtgacatcggaaaacaggtgacccttaaccaatggggaaaggattccctattcaataaatggtgctgggataactggctagccatatgcagaagaatgaaagtggaccctacctttcaccgtataaaataacttaagatggcctgatctagtacatgcagaagcctctgaagatcttaccattttctcattacattttgcaggtgtttcatcaattttcagagctactaattttaattttattacagttataaagccaccagccatatctaataccagacaccactattaattgcagctgtgcttttattactctctctcccagtactagcaaccagcatcaccatactactgacagaccataaccttaatatactttttttgatccagctggaggaggagatccaattttaggccaacatttattctgatatttttgtctatccaaaagtgtacattcttattttaccaggttttggaataatctcacatattgctacctattattctggaaaaaaaagaaccatttgattatatagaaataatatgacccataatatcaatttagctcataagctttatcgtatgaggctatatttacagcacggatagacattgatacctgaatgtattttacactagctactataattattgctattccaacaggagttaaagtatttaactgactagcaaccctacatggaggtaatactaaatgatctccagctatattatcaggtttaggctttattttcctgctgacagttggaggcctaacaggaactgttctaactcatcagcagacatcaatcctcatgatatatactgtgctacagcacatttctaacatgttctatcaatagctgcagtcttcaccatcacaggatttattcactgattcccatattttcaggttatacactcaacctgagccaaaatccattttgtatttgtaggtgttagcttgactttctttccacaacattttcttgatttatcaggcatgccatgacaataactacactgatggatatacaacatgaaataccatctgctatggtttggatgtggtttgtacccaccaaatctcatgttgaaatttagtccccagtatggcgtcttgggggatggggtttagtgggaggtgcttgggtcatgggggctggtccccgagaacagattaatgccctccctcaagggtgactgagctctcgctctactagttctcaagggagctggtttttaaaaaagcctgtcacctttcccctctcaccatgtgatctctgcacacactggctccccttcaccttccatcatgaatggaagcagcctgaggtcctcaccagaagccaaacagacataggtgccatgcttcttgtacaacctgcagaaccacgagccaaataaacctcttgtctgtataaattacccagcctcaggtatcctttatagtaacacagtatgaactaagacacctattacacttgaattagttccactataacactttgaaaagtgaccagcatctatgtttaaataccaaaactagaaacatccacataatttttttcaataattctagcattatttacttcaattgaaatttttgaaatatgcctattcttaaaatccatcaccaaagaacactgaagccttaaaacgtgagacccccttgggaaaaagacaagctaaaatttattcacatctttcactattcctacaataataggacaatttatttatattctaatcatttcattcccaaacatcatgtttcctacccccaattgccaaatccataatagattagtctctttttaataatgattagcacaacttgtactaacataataatacataatgtcaaaggatgttattaccaataacagcaacacgtcttaaagcacactttcaagcaaccgtcctttttgaccaccaccactgaagttaccagatcatttacctttataccacccctccagcattttatctccatttctttctttctttcttttttttttttttttggagacatggtcttgctctgtcgcccaggctgaaatgcagtggcgtgatcatggttcactgcaacctcgacctcggggctcaaatgatcctcccaactcagtctcccaagtagctaggaccacaggcatgtgacataatgccctgctaatttttattttaagtagagatggggttttgctatgttgcccaggctggtcctgaattcctgggctcaagcaattcacccacctcagcctcccaaagtactgggattacaggcttgagccattgtgcccagcctaccaccattttaaagattctcctgtgaaaaaaaaacaaaaaacaaaaacctctcctgattctgtggttcaccctgcagtggacaggagctgcagggtgaaccaggagaatggcaaaacttctcaagaggtatgcatgcttcctgtctataccttttgcttttctttctctcctaccaccataattaacattttgccatatttccttcctaaatttgttccatggatttttatgtagttgaaataatactgcatatataaactctaatcacacttctttcccctaattattacagtgttcttaaaaccttctaaaatattgtaaactctatttgtaactttgagggttcctcaaatgggccttcaacagtgcctggtgagttaattcactgtcccactctagtttttattgttgacttacttctttctcactctcttttaaatactccacaatgaggtttttgttcctctcattgccaaacccaccttgtcagggtcaccaacacccttcatcctgccaaatccaatagccaattttcagcgttcctcttacttgaactcctagcattatctctctcagctaactgcttcctccttttgtcagttggcttccaatacactgcattccctcttcctaggtcacaggttactcaggttagtcctcaatttcctttgctagattgttttcctgactgaatgttggaacaccccatggttcagtccttgagctgtaccttgccttccgtctaaaccaattcgctccataatctcattcagttcctcggtacagagagtaatcccatatttatctcttcagtcctgactatcccctccacccacaggcttccaaatgcttatctaacttcaccacacagatatctaatgagcatatcaaatacgtaactcttgacttccttctccagccttccaaaccctgatgcctctattgccaatcttcaaaataactccattatgaaggtattaattctaccttcaaaatatagcctgttctcatcacctccacatattaaacccaattccaagccactgttatctctagtgtgaacttctgaactagtcctctcattagtcttcctgctttcatttttatcctcactgttcacatagcactcagtgacctctaaacaaagatcctttacttgtctgcaaaaagtcagccaggggctccctatcacacttagaataaaatctcactgcttgcaacaaccaacaaggtcctacatgatttgacctctgcctatttctctaacctcacctcaaatttccactttcagtagccacactggccttcttgctgattctcaaacaagtgaagctcagtttctctcaggatcttctcttccctctgcctgaacacacctttccctgatttacagccaactttattcaggtcttaattcaaatgttacctcccctgagctatcattcctggtcctcctaacctatgaacgtagcaagctctcagtacgtatgtgctggctagagatacttatccaagtttaactataaaagagcaaccaggaaaaacgtaattcaaaaaatagataaaagcattgtccccaaaagagatcagaccaaaggtagctcccttattaaaacaaaaagggaatgtaaaacagaagagtggcaaatgggagttgggagggaggttccacggggaactcacacacataaccttcctgctctccctatgtctcaagccttctttccacaggcctttgaagagagcttcaggcacacacctcaaagtgctgccacctacggatcagctgtattattagcaatagctgacactgtgaccagcctttattcacctgagctctgtctttatgtcatggttctcatcagcatccagggctcctttccttgctccagtaaggaaagtatatttggcttagggactgcacatacagcttaaaagaaaggaaatggtgcatggtcatgctaggggattcccagattcaaatctagtccattggcatcaaagaagggagacactgacaggaagtgacagagaaagatgtgacagtctaaaggataagagataaaaaggtacacggtggagctgtccatttctacttctactcaaacgtaagcctttccttagggaatggagatcagaaattcacaatgaatgaggcagaaattatggggaacaaattctgaatattacgtaggatgatcttacccaatgagatcaggttgctgtagttctccaacatcacatccctgtacaagtccctctgagcagggtccaggcattcccattcctcctgagagaagtcaatggccacatccctgaaagtcaccaacaactgaaacaacaaatccattacaggatgattctacaggaatgattctgaagtgaaatgagaagaaaatggaggaggtaattgaaggaagcaagtaacacaaaacaacaggaaattggttgcctaaacagtagtattaacctgattctctatcattcctattgccacagataaaacttcctctgtacaatagaacaattccattatccagaaaggtctgagaatttaaaaagccagatgtgtgcagtttcttgattaaagaaaatactgcaagcgttttcttcacaacaggttttaattgcacagcagataaggcttccaaatcctcaataactaatatactctcaattaatacaagttcttgctctcccttctgcctttaaatacttttaaaaagatgaatttttttccaaacaatgtttaccaaatctctaggttagaaaataaaatttgaatataacctaagaattttttgaagactcagattcatcaagttatattatgtcacagaacagaatggacatatttccattttacatacaaaatgatctgcttatttgggagtatctgaattagacaaattctcggccgggcgcggtggctcacgcttgtaatcccagcactttgggaggccgaggcgggcggatcacgaggtcaggagatcgagaccatcctggctaacacggtgaaaccccgtctctactaaaaatacaaaaaaaattagccgggcgtgatggtgggcacctgtagtcccagctactcgggaggctgaggcaggagaatggcgtgaaccctggaggcggagcttgcagtgagccgagattgcgccactgcactcccgcctgggccacagagcgagactccgtctcaaaaaaaaaaaaaaaaaggaattagacaaattctctaatgtctttgagctcttagaatctataattcttgagagtatgcatctggcatgttttatttgctcctattttccacgttcctaggctatagcaaggtactggatgccagtccaggcacacagagacatcactctgaactggtacattccgggaaatcccaaggtgaacttgactatgatcatcctctctcattggttcctgggcaagagggttgtagaaggcagaataaaggccccccaaacatgtccacaacctaatccctgaaacagtaacagtactgactcaatgataaagaaaagcttgcttgcttaaatataattactttgcttgactttgtagattattcagtaagaacagtctcaggaaaacaggaccttcaacagagataagagaattaaaatatgcagactaacaactctgggaatgggctgaccagcctgataagaataggctgatggcacctacagaaggccacaaaacactgaccaagaaagcaatgaccaacaaagcaatgacctgagactgcacatttcacaagaatgttttgatcatcattttttctaatttcccttaaaaacccctgatatggagacagaactcggcggtctttgaacactagttcactgcctcccctgggttgttggattcctgaatagagctaaccatcctttcaccaatgctcatctcttaaactttcaagtgacaagtggtctggacctgaatttcgttacaaaacctatgtataccttaccttacatggcaaaggggactttagaagtgcaattaaattaaggatcttgagagggggttatcctggattatctggttgggcccaatgtatttgtaagtgatagagggaggcaggtgagtaaaaaaaggaaacgtgatgatgaaagcacaagtcaaaatgtgattgctggctttgaaaatggatggaagccacaccccagggatcgtggacagcctttagaaccagaaaaggacaaggaaacagattctccagtcctctagaacctccagaaggaacatggctctgctaatactatgatattagccctttcagactgatttcagacttctgaccagcagaggtataaatcataattatattgatttaagccactaaattagtggttattagtaacggcagcaacaggaaactatatcagcaacaagactccttccttcatagaacccaattcccaaccaattttcaaactttcacagaaaatcttgccacacactgagactaggaacatccaacaaaaaaatgctatcactttcaaatggaaaacccaggattgtagagaagatcaaattttgtcatgtatcacatttaaacactcatctctacctcaccaaaccgtggtactaatgtgtaccaatcttaaaaggaggtatttctgttccctcagagctctgggcagaagactatgcctgtggacaatgtagaattatctgctgaatgaatatctgaaaactgtttggagaggggaaaagcattgagaagaattgggctctttgctactattactcgctagaatgggagacgtttggaagcagttcccttaaggaaccaaacaaggcaggaaattctgggataaatctggtgttcacattacacaacaaaatgattgtacttcaagaaggaaagaaacagcaactcacgtggggcatggttttttagaactgatcaattttctgggttcttctcctggaggtgtgcaaagtccagagaagccagtgctggacaaggaaaagaagccacaagattagacttggctcacagcccacaaaataaactacttagaactacctttacttctcctcttttgggaatttggaaaaaatctcagttcttccacaaacccaatggaagccagctactgcagaaggggttcaggcagacctttccttaatgtccatgttgaacaggaccctaggtgctgttactttcccatggcatctcctcttccacagtagaacagaggcatgcccagggagccccccaccatcctcctggacccaaacactaagtcaggtactttgctcccaatcttaggaaggggcttcagagaccaaaatgtggccttctttcagacgtcatgaacatcagctagactcacagacattttgacagacatatcagggtcaacagatccaaaacagtctcatcccactcccctgaatctagttctttcttgcctgtttactcttccctataaaagaaaattcctttatgcctgacctttgctatgcttgcagatcttatggctggagtattctcccaattacaacacctcctcccttactgcagtgttcctgtgaataaagtcattccttaccaaagtctggatttgtttttttatttcacaggttgaataacttttgtagaataacaaaacaaactattttaactgtaacctaattctccaagccatggcacacacagaagcacggagggtcaaacaggagcaacatccacatgacagccaatgtgcgcacagcacgccccctcttgcaatatgacttcaagattgagcaagttccccaactagagccacctacttgccatagttgtgtagcactgatcttttttttttttttggtagcattgatcttgcatacatgtataatccatgaacttaacatcaatgttacttgtgtgataccaagaaaacccagtaagagagcaggtaaataatttaagtaagattttgttgggtatagttgagctttgaagcaccataagccattgtactaagattttgtcctccccgctaaccaattttcacctcctttgaggcaatatcatcgtcattaagaatacatgggttggctgcacgcagtggctcacgcctgtagtcccagggaggccgaggcaggcagatcacttgaggtcaggagttcaagaccagcctggccaacatggctactaaaaaatacaaaaattagccaggcatggtggcacatgcctgtagtcccagctacttgggaggctaaggcagaagaatcacttgtacgcgggaggtggaggttgcagtgacccaagattgcgccactgcactccagcctgggtgacagagcgagactccatctcaaaaaaaaaaaaaaaaaaaaaaaaaaaaatcccatgggttaaaataatatatataaaatgatataaagatgttaacctctgcaagttaataggatatttgacatatgatatacaaattaaatatgaccccaataaaagtacaagtatgaaagcagatacattcaatttaaattcaacaagcaagaaaattaaaaagcaagaattggaaaaaaatgcctgataataaagagaacagagatttcaaaataccactcctatcattaaaatgttggatactgtaaaaaggaacaaaatcatatcctctgcagcaacacagatgtggctagaggccattatcctaaatgaattaacacagaaacaaaaccaaataccacatgttgtcctttataactggaagctaagcactgggtacacctgaacataaagatgagaacatggacactggcaactactagagcacggagagaaggaggagggcaaaggagcaaacctacctacctatcaggtatcctgctcactacctgggtgactggatcataccccaaacctcggcatcacacaatatgccatataacaaacctgaacatgtaccccctgaatctaaaataaaagttgaaattttatttttaaaaagttggatactgcatatgaatagaaagaaaagattaatgtaactgaatagaatctctgatctctggggaaaggtggattattcagtaaatgttattggagaaaggtaaaattggaaccccattttataacacatacccaaattaactccaaatatataagatatctaaatattaaaaaatgaaattggcagggagtggtggctcatgcctgtaatcccagcactttgggaggctgaggcaggtggatcacctgaggtcagcagttcaccgtcagcctggccaatgtggtaaaaccccatctctactaaaaatacaaaaattagctgggtgtggtggcgggtgcttgtgatcccagctacttgggaggctaaggcaggagaatcgtttgaacccagtaggcggaggttgcagtgagccgagatcatgccactgcacttcagcctgggcgacaagagccaaactccgtctcaaaaaaaaaaaaaaaaaaaaatcacaaaaatgctagaaggaaaaacagactgttccttcttaacttcagaggggaaaattctgtatctcacaatcatatgaataaatgttcctacatttaaaaattgcctaaaagaatacacagacaaatgacaaaatgggagaaaatatgcgcaacttaaataaaaaacagagtcctaaaatccaaagagctgtattttaaaaatcgagggaaaacaagagaaagacaaaaaaatcattattttaaatggacaacagacaattcataaaaaaaaagtcaacggtcattcaacatgtaaaatgctcatcatttaaataaagagaaattcaaattgaaacgaaattgagaagacttctgaatccaatatcattaagatcctactggactaagttccttgaagatacacctatcagatctggacataatacaaaaagcaactaactgaaggtgctggccaatgaactgaagcagtattcctacaaaaaaatgcaaaaattagccaggcgtggtggcgggcatctgtaatcccagctacttgggaggctgaggcaaagaattgcttgaacccgggagttggaggttacagtgagccaagatcgcgccactgcactccagcctgggcaacagagcaagactccatctcaaaaaaaaaaaaaaaaaaaaaaagcacacttgaattgaatcatgaggaaacatcaaacacatacaaactgaggaacaatctacaaaataacaggcctgtagttttcaaaaaagtcaggatcacaaaggatcaaagaaaagtccaggaattgttttccattaaaagagactaaagagatgatttaattaaattaaatgtttgatcctagatatgattttggattggacgccagataaggggcaaaaaaaggctataaggagctgggcatgcggtggctcatgcctgtaatcccagcacttcaggaggccaaggcgggtggatcacgaggtcaggagatcaagaccatcctggctaacacagtgaaaccctgtctctagtaaaaaaaaataaaaataaaaaaaaattagctgggcgtggtggtgggcacctgtagtcccagctacttgggaggctgaggcaggagaacggcgtgaacccaggaggcggagcttgcagtgagccaagatctcgccaccgcactccagcctgggggacagagtgaggctccgtttcaaaaaaaagaagaagaaaaaaaaagctataaggacaaaattgtaacaattggtgaaatttttctatgaactctggattagacaattattacatctctgctacatttcattttaataaatgaactatagttatagtcccctgtgctcagaaaatacactaatataattatagataaaggaaaatgatgtctgaaaattactatcaggtagttcagaagtatatatgtagagagaattagcaaacaaaaaagcaaaatgttaaaaactggtaaatatgtaaggacataggacagttttttctattatttttgcaacttctctgtaagtgtaatattatatcaaaataaaaattttaaaaaaccaatgctatgtgagtactgatttttaattaagagactaaagaggcataaccaaatgtaatccatgaaccttaaatatagcaaaacataaaaaccaaaagaaatctaaaatgcattctctatcttaacagtagtgacagttactgttgttttcaaacaattatattttagaataaagaacgtaaattatattaatgttttagcaaccaagattgttagcataaaacagagatacaagtataaaatcaaacaagaaaatactctgtaatttgtctgaactattattataaattcatgattcatgatttatactttaaaaacaagttattagctttgttccctgaaatggcctagaataaacgacagccttatggcaatgagaaactctaatgcccagacagtggtcactgtacactgtataccacaagaggaatcagaactccttagagaaatggctcatttcagggctggcacaggaaatgtagaagttgatcttgggatcatttgttctgccagaaagcaaataagctatcaactctactagaatcatgacagaaagacacagaactgcctggaaaggactaccactggcttaaaaaagagcagtttgatataaaaaagaataatgatcacaatagttcgaaacatatggtattcaaaacagacactcccttttgggactccttagaaggttgtagggcaccaactcatttctctgaaaatatataaagggaaagaatcaaatcaattactctgcctttccatatgaactgtatttatttatcttgagatggagtttcactcttgttgcccaggctgtagtgcaatggcgcaatctcggctcaccacaacctcggcctcccgggttcaaatgattctcctgcctcagcctcccgagtagctgggattacaggaatgtgccaccatgcccagctaattttgtatttttagtagagacggggtttctccatgttggtcaggctggcctcaaactcccgacctcaggtgattcgcctgcctcggcctcccaaagtgttgggattacaggcgtgagccaccacacatggccatgaaccgtattttaagataaccaaatacttgatgaaaaaaagttcttatatatagaagaactgtaactaatgaatacaggaggaattgagagaatttttttttaatcaccatatataactgttaatgaatgggccaggcgcggtgcctcacacttgtaatcccagcactttgggaagctgaggtgggtggattactcgaggtcaggagttgcagaccagcctgggcaacatggtgaaaccccgtctctactaaaaatacaaaaattagccaggtgtggtggcacatgcctgtaatcccagctactcgggaggttgaggcagaagaaccttttgaacctgggaggtggatgctgcagtgagctgagatcacaccactacactccagcctgggcgacagagtgaggaaaaaaaaataaagaatggatcttggtatcaatcataagtggacgttataacctttaggtcagtgcttctcaatccttctaaaatttttcacggtcatatccctaggaacctttttagatacttttctctaatagccaccactctcatgaaattttattaccatagatatactgtatatatgtttatgtactgtggccctttggaggaccacagatcattgtaatacctatgagtttttgtcctcttccttctcaaaaaccaagtttcacccacttggaaggtgatatcctccaccctcattgagaatgcatgctttaggtgaaaaaaaggaaaggattaaatggacagcatttaaacacatcaatatgacatcactgaaagtgggacatcagactgtaagggcctcatgatgtgatgtaataggaagtacacagcaccaactatgaattaaaggtgatttagggaaaatctgatccaaattccatcaaacctctagatctaactgcctgtttacagaaatatgaaggaacggaaaacaaattataagacagtacaaagaagcaattagctaaaagcagtatacagaatattctacgggacagatgatctagtttttctacaaatcaacagcaccaattaaaccaaaacaaaacacaggagggaaactatcatgcattaagtaagtttaacaggtttggccaccaaatgcaatgtgtggactctatctggatccagatttgaacacacctattgtaaaaatatgtctttgaaataattgggaaaatctgaatatgggggtatacaagattatgaaataaccaccacgctgttacaccaacataagaaacaaatttattgttttaaacttattgttagtttttttttttatgttggtataacagcatcatggttattttaaaatataatgtcctttttggtaatatatgcttataagaggataaaatacaattttgaaatactataggaaaaaacggggaaggattgatacaaaggtatttacaaatgtttttaattacagctaggtgttgaacatgttggggttcgtattattctttagcctgcttgaaaacatccacaataaagttaaaattttaaaactcttcaaatttcccccagaaagtacagttatttttcatcaaaaccttagaccaggccaggcgcggtggctcacgcctgtaatcccagcactctgggaggcccaggcgggtggatcacgaggtcaggagatcgagaccatcctggctaacacggtgaaacctcgtctctactaaaaacacaaaaaattagccgggcatggtggcgggcgcctgtagtcccagctactcgggaggcttaggcaggagaatggcgtgaacccggaaggcggagcttgcagtgagccgagaccgcaccaccgcactccagccagggcgacacagcgagaatccgtctcaaaaagcaaacaaacaaacaaaaaaatcttagaccagaaaggactgctgtatcattgggtggaaaggagaggtgtagtgtggctggggagtagagctaaactgatgatcccatccccgcagcatcatttatggggtgcctaaggaccagtcactagcatggctggttcttccttaggaagatgttgctggaggtagaaaacgtttcggaaaggaagaaatttgaggttagaaagaaaacaggaacttcacacaagactttcagaagtgcgatattcttttcctctgggtgcctctcttggaaaacgcagaaccgagaaaagaaataagcatcatagaacatcagagctctcggagcagacgaaacaatttaggataacaccaacctctagaaagggattagtcttccccacagggctgtcaagctagaataggacatctttaacagtggtcttcttcctaagacacttccaggggtaaagcctcaccatcagggaaacttcaaaaagagcctcttactctgcaaagaaactgcagcagctgtaaccgcacgattctcagctggcttaatgatgtccgtgtcacacgaggagtactgcggcccgggaggggccaagcgctaggagcattaacaggcggcaggtgagcccaccccgcggccgcacaagcgcacacgcacacgtccagggcggaggaacactactagtaacacccgcctccttctagcctccctatcccaaagttatggtgccgattttgtccgcggcaggggctccaggggcacactcataaattcggtgcggaggaacacaactagcagcaccacacccccgccactgccagaaccaaagtgacggtgccgacacccctccgcaagcgcaaggccgacttccataagtaattagccagagcaccgtcccgttcctgtcagcaccgagccccagccaggacaccggtattcccagcaccatacaagaactactttttcgatgaagcaacccaaaagctgcgagcggttcccggtgaggccgcccactcacctggccggcgcagacaagctccgtgcgtcaagacataacagcgtaagtgtacgacgttgcgcagcgacgcgggggccttcgggaaatgtagtctacaactggaaaccggccggatcgtgtctgcgcaggcccagcagctaagatcgggtccggcgctccagaacagaacgatccctgaggctcccttgctcgaactgtgggacttaccctactatggtccgagcctaccctatttcattatactcaagtaacgccccagaaattccagagaatctcacacaaagaggttgagtcttgccgtggtgccttcaggggaatgtcatcccgggctagaagagctgcaaaaggctgtcaggtaaggtctggatttctctctgacagctctggccgtgacgcagtggccacgataccgggttgctgctcaacggggttcggaagtgtgacgcattctttgcggccatgtgtgtgtgtgtgcgtgtgtgtgtgggtctgtgcgcgcgcgtgtccgagtgtcctctgtgggtgcagagtgggtagtggccatgcctgtgtgatgtgcgtcagattatgcttgaggctattagtggcgcatttagtattgtgtgcggaagggtcttgggaatggtttgattatagctttgagggtgactgatgtctgtttaatcagattcagcctgcgactgagtatcttataacctgtaagaaattgatttttctttgcatggtcatgaatttaaaatagattcccatgaaattatataaatgtagtgaatgattcattgagagttcgcctgtggcagtgaatgtggggaaagaagtgtgtgagcataatatggtgagaatgagcacgattgtgtgcagcgctgtattatagtgatatctcctggcttcagttttctcacctgtaaagtgagggtgtcagtcgtgtaacgctttggaacaatgctttttaataggaatttctgcaaaactgagttccattttttatatctgtgctctccaatatagtagccactagctacatatggctattgagaaattgaaatgtggctggtttgactgaggaacgaattttttaaattgtgttcaattttaataaatctaaatgtaaacagctatatatggctaatagtcttcctattgaacagtacaacctggagcattaatttgccttcaagatttgaagggggtaaaaacttaattcatctagcaaatatttgaaaatgaaattcttaaaacttccttaaatttttttttaaatttgagatgattgtagattcatatgaggttgtaagaaataatagagacattgtgtgttatcttcaacttagtcttctccaatgacaacatcttgcaggactgtagtataatatgacaaccaggatgttgacattgatagtcaagatagatcatttccatcacctcgaggatctgttgtgttgcccttttatagacaaatgcactttcttccctcttgtttgaagatattcgcgtcaacattaatgataatgtaggcatacctcattttattgtgcatcattttattgcactttgcagatactgtatttgtttgttttaaagagacaggctctcactgtctcacccaggctggagtgcagtggtgcagttatagctcactgcagtctcgaactcctgggttcaagggatcctccagctggcccacaaagcctgaaatatttattatgtggttctttgcaggaaaagtttgcagactcccaatctatattatttctgatggctactttattttctattatatggatacactagaatttatttaacctgttctttattgaagtctaatttatgtttgtatctagctttttccattttaaaattagtctatctgcacctgtctgcatatatcctagtgaacatatataattattttccttagacagggtcataggagtgggattactgaaacatctggctcatattattaaattctgctaatataaatttctaatttaccctctttaaggtggcaccagtgtataacatggcgtgagggcatctattttactccagtttaacatgttattatcagtctattcaatgttcccgtgttgtaaatataaaatgctatttgccactttaacgtatattatcttaataagtagcaacatttaatagcttttagtcattaaacccaagtcattattcacgcttgggttttattaggcgtaataagaaattctgggtatcagtgacaagagcacagttgaaaaagaactggctttgtagttggagaattgtggattcagaactcagatgtcttgtttattaacagtggatttaggtttctgtttttctgatgttgaagtggagataataatgacattgtagaactgttctaaggattaaatagctatatataaggtatgcatcacataaaagttgattttttttttattgcttccagggccataaatttacttctccctctagtttgggtactgagggagaagggagggtgaatgatgtcctgcagggaccctggggactcttctgattgagggaaatggggagtggtgagccctgaggattgtgggagttccagttcaggctaggaaaagggatcccagtgtgcaagtataattttgcaatgataaaggccatcatggattgtctatgccagggatcagcaactgtttctttggttttttgtttgtttgtttttgagacggagtttcaatcttgttacgcaggctggagtgcaatggggcgatctcagctcaccgcagcctccccctcccagattcaagcgattttcctgcctcagtctcctgagtagctgggattataggcacgcgccaccacatccagctaattttgtatttttagtagagacggggtttctccatgttggtcaggctggtcttgaactcccgacctcaggtgatctgcccgccttgacctcccaaagtgctgggattataggcgtgagccactgcgcccagccagcaaatgttttttatagaggaccaaataggaagtattttaggctgtgtggcccatacaatctccattgcaactactcaacttggctatggtagctttctgaaagtagccatagtcagaagtaaacacatgagcatagctgtgttccattccagctttatttacaaaaacatatgggcgggccagatttggcccatgggccataggttgcaaactcctagtctgttctatctttcgtttttaagtctggggaggccaggaagctcctaaggccatgaaggcagtctgctttggataatgtggtctgtcccctttggatggtgagaattgagggaagagaatctactctgggcaattctgaacatcccagccttgggcctagatcagtatcctcatagtggggattggcccagaactctcctgctgaaatattggtcatgtgttctaatgcaggataacctctgcactgtgtccatcctcgtacagccaggttcccttgctgtggtgagtgtgtcggagggaggtgagggaagtgtaggggaggtatttgcaagcaacagtggaaaataaaagattattaatttatatcatattgttacctctgaggcagacctagtctcactgtctcatttttttctcctctaactcaggcttctcagaactttgcttctccagcagaataatcctgcggaagactgagcagttcttgtgagtgtaaaaccatggcccatgtaagtcacagtttctctttcctttttagattattttgtttttaaagatcatgtgaacattttcactctttatgctgacacttcctaagaattttttcttcatccccacatttccaagctcctcccatgggccccctctcttttctaaccagtatccacatgcacattgaccaactcattcagggtactcagtctctgtctagggcagagatggaacagacatgaagttcctagagggggaggtactttaccatcctttgtcagatctgaggtgtaatgaaaccaagaatggaatcatttgactacacgtaggaaagcactgcagttttccacagatcctgtgtctgtagataaatgcagtttaatattgattggcctcagtttcagtatgtggttggggcctgcttatagagaggccaggggatctttcctgagaatctctgaggtgaaaacccatagtaagacgcattttgtggttaaacggaatgtgctagtcttgacatcagtatgattctggttcattacatcaatattcttaatctcaagaaaaaagaaggtgtgtagtacttataagaaaatcatccagatacataaatattagttaattgtattctcccagatttgcagtgaggtactatggcctcgaacttctgagttcaccactgtactccagcgtgggcaacagagtgagatctccgtctcgattgatcaatcgattgatcgatagatagatagatagatagataaacttaaaggaaaaagaggatataggattcttttttatgtattaagtggtttttcttaaagtatttattattaagtaataatttattgagaatttttgaggtagaaatatagtttatttgcttgtatccactgtttaattgaattgggaaacatttatttgttcccagaaatgttttgagtagttaaagaaccccataatatacaggaaattttgcatatagtggctggattcttcaagaaaatgaggtgactctgctttagaacacctggttcctttcttctatctttatcataagctttcagccccagcctagagtttagtatagtaccccttgctgcaatgaaaccttttatctccttttcttctttttaaaatacttgttctgtaatttcaccagtaatatgttggtttatggtttcaggcattggtgacgttcagggatgtggctatagacttctctcagaaggaatgggagtgcctggacactacccagaggaaattgtacagagatgtgatgttggagaattataataacttggtctcactgggtaaggtcacctatgtcaaataatgtagactctgttatctgaaatagtagctttctcttccacaaatttaggactaattattaagaaactagctgaatttcttctctcttcctcaaggaatggactgaactttgatggtttgtgaatggcacttccactaaatgctttcattttcaccatacctcactgagcctcatgaaatgttccttaatccattactgtagttacttcttccttaatagttaagagactggatttgaattttggggcatttactccaaagccaatgtcaatgaaatcaggtttcacattgcatttgagctcagaattgctatggatgctctgttatttggtaacatgcctataaggataacagccctacccagggtctacaatttacatgtcatggttcagaccaataacattgatttaaaattaaagtgaatgcattctacttcctaaaacaaatattttctcttactgatttgtgattgaaaattttacctattggacattatgctcagtacctgggtggtgggatcaaatgtacctcaaacctcagcatcacacaatatccccaggtaacaaacctgcacgtatggccctgtatctaaaataaaagttgaaattagttaaagtaaaataaaatttattaacttagcatctaactttaaatgaatatcttagcaagaacctagaaatattttaggaagcttcttgttttgctctaagtaaattaacaacaacaaaaataataatagctaatagagtgcttactatataccaggcatcattctaagtactagctacaagatacaaaagaaaaaaagaaaataaaaggtactacttttattttcattttacagatgaaaaaactgaggcccaaataatttaaccagtttgtttacaatcattagtcaataggtagtagagtagaatttggacccacatagtctggcttcagaggctatgccctcaataactactgcctctcaatagagccagtctgtatgagttttaattccaaaatgaattaaaattctcctagatgaattttaattcccctgcccatcaagtttctttattctctgggatcctgaggttacactaagttgaatattctttaatcctgtcagttttttccgaagtcttcatcgaaatcatgttgatccatataaatttaaccaagtctcaaaatgtttctgaatgtgcaatgttttatttctatatattcttttatttctttcttgtaagcaggatattctggctcaaagccagatgtgattaccttactggagcaagggaaagagccctgcgtggtggcgagggatgtgacaggaagacagtgccccggtgagttgagagttcatcaggcagatggaagccctcattgccagtcacggccagctggtgagggagcatatacaggctttgcatgctgtttagggagttactctcagaggcctcaggcctttggagtaaaggttaagacagggaagaaaacagatcatctgagcatgaactatcaaaagaacctcatcttggctcctacttaccacctgtctttgtttttgtttcccctcgtattactctccatttcagtaaagggaatgctctttcctagtgcaatcaattgcttcctatcttttctccattgacatgtgtgcttgtttctaatgcctaaaagttcagtctttcacatattcagcatatatttaccgagtgctcactctgtgccaagtgttatcagtgccttggtgaataaggccaaaacctccctacactaatggaattaacattgtagtagcagagatacatagtaaactgtaaacaaatgaatatataatattaaataatgatgcatgctatgaaagaaacctatgaagggtaaagagatagagtttgggcaggtttaattgaggtgggctgcccagggaaggctcttcgaagagagaatatatgtgcagagatgtgcagtataggcttaggccatgtgaatatctggaagaaaataattccaagcacagcagagaagtgagctttgtgtgtttgaagaactggaaaagctcagagcagattcagagtggggaagagtaactaaatatgaatttagagctgagcaggggccaggtcttatatggttctgtttatcatagtaagaaatttggatttttcttttccaagagtgattgaaagccataatcaaaaatatgtttttaaatgatcactgtagatgctctgtgaagaatatactaaacaggggcaagattggaagtaggaagatcagttatcaggctatttcagaagtctagattagcagtgaaggtagcttggattgggatggtagtggtgaggggtggtaagaagatgctgtattcatcttatgatttgaaagtagagctaacagacatgccatggggtatgagtgaacaagaaatcataggtgaacaagcagctaagtgtatataatttgctgagatggacatatgggaaagatagcttggaagatggaaatagagtcctgatttaggtatatatatttaaaatgcctacttgtcatcaagatcgagatgttgaacagagatggtaggatgagttatattaacttgggtgtccagccaatcaactgactggatgagatcacttagggctgatctgacctactacctgtttttgtaaataaagttttattgaaacgtagccatacttaattatttatgtgttgtctatggcagagttgagtagttgagacagaagtcatatggctcgcagtgcataagatatcgactgtctggtcctttacagaaagtttgctgattccctccctttagcgaatgagtttcatagaatgaagggagccagaggagaaagagactgaggcccagggcactctattcagagaaggaagaggaggcagcaagtagattgagaacaagtagcctggagagtggtaccaaaaaagtcaaatgaagaaaatgtttcaagtggaagggagtagtcatctgtgaggtcaactgaactgtaaactgcctataggatatggcaggaaagaagctggtggtgaccttgtgttaagaggacaaggtttcagtggagtcagaggtgaaaaaagcctgctagatgtggctgaaataaaatgggaggtgaggcagtgatgacagtgagatagaaaacttttctaatgggaaatctgttaggagggaactagataagaggttagtagctagaagaggatatgggatgtaaggagtcttttttttttttttttttttgagacagagttttgctcttgttgcctaggctgcagtgcaatggcatgatctcggctcactgcaacctccacctcccgggttcaagcaattcccctgcctcagcctcctgagtagctggtattacaggcgcctgccaccacgcctggctaatttttgtattttagtagaaacggggtctcactatgttggccatgctggtcttgaactcctgacctcagatgatccacccatcttggcctcccaaagtgctgggcgtgagccaccatgcctggccaggagtctatttcaagatgtgagattttaagatgaaaatgattctatagaaaggggaaaaattgtagtagagggaaggataattatggaaattggaggacaaggaggtaggatccagtgcacaagaaaaatttagagaactatagatacgacaatggatataggtgggttgattgatgtggtattatgtatttcttttcaatgcttcatttttattagaggaataagggagatcatcagctaagaattggcaggagggaaaggagagttatgtttgaggtgaaagatgtaaatatattttgaatactggtgttcagtttacttgcatctcaatagctcgttcactttttattttctgttaatcaggagttaataataataacagttaacattgattatttactgtataccagatttagtcatttcacaatgtatatattcttcaaaatatgttgtacagagtaaatacataaaatttatctgtcaatgtaaaaaataatgcatttttaaaactatgaagaaaaggctattaagttctatatagtatgttgattcctctatatcaagccaaattctgatttgtattttatttgcagattttttttagttgaaattcttgggctgtatataatcagatcatttgcaaatcatgatagtttttcattctttcttaaaaatgtttgcctctaaagttcttaattctgcttagttgttttgcttatcataattttataaaaaggataagataacttttctttttgctcttttctcgagtagctaaactaactttaaaattatctgttctttaaaactttgatagacgtctatgaaattgtttgcaaggataggtgtttcacaatggaatttcatttgcttaggctttttatttcttctgtggtcaatacaggaaattaatagtttccttaaaattttttattctggaatatacaggattattttgtttagagcattacatagagctttggaaaatagccttactttttttttttttttttttttttttttttaaggcggagtctcgctctgtcgcccaggctggagtgcagtggtgcgatctcggctcactacaagctccgcctcccgggttcacgccattctcctgccttagcctctggagtacctgggactacaggtgcccaccaccacgcctggctaagtttttgtatttttagcagagatggggtttcaccgtgttagccaggatggtctcgatctcctgaccttgtgatccgcccgcctcggcctcccaaagtgctgggattacaggcatgagccaccgcgcctggccagccttactattttttttcaaatcagctttattgagatatgatttatatagaataaaattcattaattgtatctgtttaattattttggacaaacacgtgagtcttgtaatcatcaccacttcagtcaagatgtagaacatgtctatcatgtcaaaactttccattatgtttctttacagtcagtacccttcccccactttcagctcagcccgtgacaggcaactaagttgccttctttccctaattttgtcttttctacaatttcatatcaaataaatcagaatatgcagtattctgtgtcatactacttctacttctgatatttatgcgattcatccaagtagttagaagtctcagtagttaattcctttttcttgctgaatagtatttcatatctgcttattagttaacagtttatgaacatctaagttgtttctagtctttcgcaggcatgaataaagctattatgagtgcttgtttacaagtctttgttttaatgtatgctttgttacctcgggttaaacacctgagggtgggattcatggattatataagtatatataagaaactgggctgggcgcagtagttcatgcctgtaatcccggcactttgggaggctaaggcaggcggatcgcttgagcccaggggttcaagaccaacctgggcaacatggcaaaccctgtctctactaaaaatacaaaaattagctaggcatggtggtacacacctgtaaaaactttatttaaaaaaaaagaaactgggctgggtgcggtggctcatgcctgtaatcccagcactttgggaggccgaggtgggtggatcacgaggtcaggagttcgagaccagcctgaccaacatggtgaaaccccgtctctactaaaaatacaaaaattagccgggtgtggtggcgtgtgcctgtaatcccagctacccgggaagctgaggcaggagaatggcttgaaactggaaggcggaggttgcagtgagccaagatcacgccactgcactccagcctgggcaacaagagtgaaactcttgtcgcaaaaaaaagaaagaaactgtccaaagtggctatattgtttggcattcccactagatgtccaatagctccacattgttgccaacctgttgtattgtcagtcattttaatcttagtcattttagtggatgtgtaggtgtatctcattgtgattttaatttgcatttaactaatgactagtgatgagcatattttcatttatttgtcattcctttttctcctttggtaaaaagtgtctgttcagaaattttatccatcaaaatttttagcaattttattgaggtataatttacataacataaaatttactcactgtaagtgcacacttggtgacttttagtcaatttatagttaggcaggaatcatgacaatccagttttagaatacttccatcacccccaaaacttcccttgtgcccctttgcagttaatcccttcttcaatctacagctttaggcagctactgacctaccttccatttttgttgattttccttttctgaacatttcatataaatgggatcatgcaatgtacagtcttttgactctggcttctttaacttagcataatgttctggaggtccatttatgaagcagcatgtatcagtgatatattctcttttattgctgaatatgttctgttgtagggatataccttattttacttatctatttaccagcgatggacatttgtattgtttacagtttggggctgttatcaataatgctactataaacatgagtatacatatcattgtgtggacatatgtcttaattcatcttagttggattcataggcatggaactgctgggttatatgacgaatataactttcactttataagaaactgccaaaatgtgttccaaactacctatatcggtgtaccttcccaataacaatgcatgagggtttctgtttctctgtcttctctccaacacatgctattacctgtctttttgagaacagccattccagtgtgtgtgtagtggtatctaattgtggttgatgttgagcaattgcttattagctattggtacatctttggtggaaagactgttcagtgttttgcccattcttaaaattaggttgtttgtgttattattgagttgcaagagttttaaaaatatattctgaatataagcattttatttacatatatgatctgcaaatactttctcccagattgcggtacatggcatgtcttttcattttcttaatcttattttttgcagtacaaatatttttcattttgatgaagccaaatgtatcttttttttcttttatgaattgtgcttttgtattgaagaactctttttctcatacaaggacacaaaaattcccattgatattatccattttatcttcttgatttgtaagagttctttatatatcttataatcaacttctttatcagatatatatattttgcaatattttattagtttagatactagatatatattttgcaatattttactagtttctggagtaactttctattaattaacaaactttatttttaaaatcagttttaggtttacaggaaaatttagcagaaagtacaggtttcctgtatactctctgtccccaaacatacacaccctccccaactaccaacaatccacattacagtggtacatttgttacagttgataaacctacattgacacatcattaccacccaaagtccacagtctgcattaaggttcactcttggtgttgtaaattctattaactttgaaaaatatataatgatatgtatccacaattgcagtatcatacagagtagtttcactgctctaaaatttctctgtgtttggcctagtcatccctctctccaccctaacctttagaaaccactgagcattttactgtctccatcgttttgcctttttcagactatcatgtagttggaatcatatagtatgtagccttttcagattggtctctttcacttagtaatatgcatttaagtttcctcaacatctttttgtgatggcttattcttttagcactgaataatagtccattctctggatgtaccacagcttaatcattcacctactaaaagacatcttggttttttttaagtattggaagttttgaataaagctgctatatgcatttgtgtgcaggtttttgtatgaacataagctttcattttatttgggtaaacaccaaagaaatgattgctgagtagtacgataagaataggtttagttttgtaggaaactgacaaaatgttctccaaagtggctataatatttttgcattcccccagcaatgaatgagagttcctgttgctccacatccttgtcagcctttggtgttgccagtgttttcgattttggccattctaacaggtgtgaagtggtatctcgttgtttttaatttgcagttctctgacattcctgatctctggtttggtgtctgacattaatttggagaaattctcattcattgttgcttcatatattgcttcttttcctttctctcattttcctccttctggtattttcatcatgtgtatttacaccttttatgcttacccccagagttcttggatatctgttctgtttccttcagtattttttctctttcttttcagtgttggaagtttctcttgtcacatcttcaagtgcagagactctcagctgtgtccatttactagtgagcacatcagagccattcttcatttctattacagtgtttttgatctttagcatttctttttgattctttcttagaatattcatctctctgttttcattatccatctggatgttgtctattttttctattaaagcccttaacacatttcttatagtcttttaaaattcctggtctgataattccaacattcctgccatatctgactctcattctgatgcttgtttagtctcatcaaagtgtttctcgccttttagttttccttctaattttttgttggaaggtgaacatgatgtactgggtaatgggaaacatagtaaataggcctttaggagtgcagtgataaggtttccgcagtcccagaattaggtctcagtctttcggtgcacctgtgccacctgatggaccttaaccagtgcttccagttttttccccatcgctaggtgtgacaggatagcttagagggctgagttgggtattttcattcctctatatcattaggctctaataaaaccccagcaggttatgatctatctacttgagaaaataccctaacctcaggtgatccacccaccttggcctcccaaagtgctgggattacaagcgtgagccactgcgcccggccagtatttagatttttttaggctcttttcttatttagattgccaccctccagctttcatttaacttatctgtgttaataagattccttgacacttctagtctcccagccatctcttcatactattcagttactctgttctccctaaaattgttgagtttctttgttcattttttccagaaaccattcaacatggcacatacctgttacaatatctatacaaatcatttaaatacttctctatcaagtataggaatggttggttttagatgtaagagaacagaagagatatcatctgagaaagcttataaagaaagtacagtgggccgggcacggtggctaacgcctgtaatctcagcactttgggaggccgaggtgggcggatcacaaggtcaggggtttgagaccagcctggccaatatagtgaaaccccgtctctactaaaaataccaaaaaattagtcaggcgtggtggtgggtgcctgttatcccagctacttgggagactgaggcaaggagaatcacttgaacctgggaggcagcggttgcagtgagccaagatggtgccactgtactccagcctgggcgacagtgcaagactctgtcttggggggcaaaaaaagtagagtggccgggcgcagtggctcatgcctggaatcccagctctttgggaggccgagacaagtggatcacctgaggtcaggagtttgagaccagcctggccaacatagtaaaaccctgtctctactaaaaatacaaaaattagctgggtttggtggcatgcacctgtaatcccagctactcaggaggctgaggcaggagaatcgcttgaacctgggaggcagaggttgcagtgagccgagattgtgccactgcactccatcctgggtgacagagtgagactccatctcaaaaaataaagaaagaaagaaaaaaaaagaaaagaaaaaaacagtagagtgagcatccagtaggtggctgaataatagtaaaactcagctgtgtaaacatacatctctttgcacaggaggcagtgaacaacaggattggaaacatctctgtttaactggatagccatttaaaggatgagtaggcaaaacaagggctttttcattttatacatttggttgaactaccttggatttacttttgttctgatctgtaaaggaagtaaggtaggaaagagtgcatttaatcactgtaataaggtgagagagattagagctcctttgtaattgttacaaaaatataaaaattaagtgattgtcctgatattcagctgtcctatacatgacttatctgtcattcatcatcataatttcctttaagacaatgattaatttattgtacagtcagttgtttaatgcctgctgtatgctagtgggtagttattcactgttgaatgaaataaggattacatcttcctttgggaaggtttagggatcagaaaatcaacaaaagagcaaaaagaaaaatcagtggatatgcgtttgaaaattgtgaaatgaagaaatgaaacatgatgctggaattgagaataaaggacatagactgccttacagtcggtagggcaagcctttctgtgtaagagatatttaaccaaccattaagaatgagaaggagttggcctttcacagagccctggacagattatttttaggagatgaaaaatcccatagaaaactatatgaaatgggaaatgttatgacacaatcgaggagctgaatagaagcaagtcataataagagggagtaaggaggacaatgtctttgaaagaggtctttaggtaaccaaagaccatattatattatatggtaacatgtttggattttattctaagagtaaagaaaaactgttaaaattgttaagtggagattctcaaactttgatctatatcagaatcatctagtggagttattaaaaattcagataccaaattactcctgtagatttggttcacttgacttgtgtgtaactaaatagcagtatttgtgataaagttccccagatgattctcatacacaataaaattttagaaccactgacgtaaataaactatttgccatatcaccacaatcttatataatcttttttttttttttgagacagagtttagctcttgtagcccaggctggagtgcaatggcgcaatctcagctcactgcaacctccgcctcccaggttcaagtgattctcctgcctcagactcctgagtagctaggattacaggcgcctgccatgatgctcggccaattttgtatttttttttttaggagaaatggggtttcaccatgttggtcaggctggtcttgaactcctgacctcagatgatccacctgccttggccttccaaagtgctgagattacaggcatgagccaccgcgcccggctataatctctcattttctaagctcatgttgcctaatttcaaattatataactttattgaaatattctttaagccactgacttctagtaagaaccgttttcactttgtttcctattttgaaaatgtaaactttatgttatgctggctacaggaaaataatttttgtttgcttttatgttttctttcaggtttgttatccaggcataagaccaagaaattatcttcagaaaaggacattcatgaaatcagtttatccaaagagagtataatagaaaaaagtaaaactcttcgtctgaaaggatccatttttagaaatgagtggcagaacaaaagtgagtttgagggtcaacagggacttaaagaaagatctatcagtcaaaagaaaatcgtctctaaaaaaatgtcaactgatagaaaacgtccctcttttactctgaatcagagaattcacaatagtgagaaaagctgtgactcacacttggttcaacatgggaaaatagattctgatgtgaaacatgattgtaaagaatgtgggagtacttttaataatgtctatcagcttactctccatcagaaaattcatactggtgaaaaatcctgtaaatgtgagaaatgtgggaaagtttttagtcatagctatcaacttactctgcatcagagatttcatactggtgagaaaccctatgaatgtcaagaatgtgggaagacctttactctttacccacaacttaatcgacatcagaaaattcacactggtaaaaaaccctatatgtgtaagaaatgtgataagggtttttttagtagattagaacttactcaacataaaagaattcatactggtaagaaatcttatgaatgtaaagaatgtggaaaagtttttcaacttattttctactttaaagaacatgagagaattcatacaggtaagaaaccctatgaatgtaaggagtgtgggaaagcttttagtgtatgcggacaacttacccgtcatcagaaaattcatactggtgtaaaaccctacgaatgtaaggaatgtggaaagacctttagacttagtttttaccttactgaacacagaagaactcatgcaggtaagaaaccttatgaatgtaaggagtgtgggaaatcatttaatgtgcgtggacagcttaatcggcataaaacaatccatactggtataaaaccttttgcatgtaaggtgtgtgagaaggcttttagttatagtggtgacctcagagtacattctagaattcatactggagagaaaccatatgaatgtaaggaatgcgggaaagcctttatgcttcgttcagtccttactgaacatcagagacttcatactggtgtgaagccctacgaatgtaaggaatgtgggaagacctttcgagttcgttctcaaattagtctacataagaaaattcatactgatgtgaagccctacaaatgtgtacgatgtgggaagacctttagatttggtttctaccttactgaacaccagagaattcacactggtgaaaagccctataaatgtaaagaatgtggaaaggcctttattcgtagagggaatcttaaagaacatctgaaaattcattctggtttaaaaccctatgactgtaaagaatgtgggaagtcctttagtcggcgtgggcagttcactgaacatcagaaaattcatacgggtgtaaaaccatacaaatgtaaagaatgtgggaaggcctttagtcgtagtgtagaccttagaatacatcaaagaattcatactggtgagaaaccctatgagtgtaaacaatgtgggaaggcctttagacttaattcacaccttactgaacatcagagaattcacactggtgagaaaccctatgagtgtaaggtatgtagaaaggcctttagacaatattcacatctttatcaacatcagaaaactcataatgtaatttaatataagaaaaggtttccatgtcatgctctatttatagaatatcaaaatatttatggccagaagttctgtcaatgtgttgatgtttttttacacatattaacttaataaatgtatgagtcttaaatacctcttagttctcattaaatttaggaaaattcacactagaaaataaagctgttaatgtaacagttgtggaaaagtgttctagcaacagcatatacttatcatcattgcctttccactactctactatctgtgtgatattagacaaaatatttgcttcttggtacctcagctgtaaaatgaaacacacctaaaagtgtggttgtttccaacatgtataatacagcaacaactatctggcccaaactgctttggattaatattggatattactgtttttattatcatcaacattattattagtggatttcttaataggaagatgcaatggagatgacaaatttggaaaaaccactcatcacttacatttcatgaagtacttctttgataaaatctgttatgggctgaatgtttgtgttcccgtaacaattcctatgttgaaacacgaatcccaaggtgatggtatttgaaggtagggcctttaggaggaaattaggtcatgagggtggagccttcatgagtggaattactgcctttataagaagaagccaaagagccagctagctctttcaaccacatgaggttacagcaagaagtcagcagtctacagtgcaaaagagggccttcaccagaacccaagcatgctggcaccttgaccttggactttcagcctccaaaactgtgagaaataaacctcagttgtttataagccactgagtctacgatattttgttatgcagcccagataactaaggcactccattagaatataaataaaatgtaaagatctaaattcagacctcattgcttaagttctaaaattaaagatgaagagaaaccctaaggatgtagtgagtgggaggaccttagaatgtagctgttgaagcatcaaagagaggtgtgagggaatttacccataataatacagaaattaaatggatagaaaaaagaaagatctggccatggtggctcacgcctgtaatcccagcactttaggaggctgagatgggtggatcatctgaggtcaggagtttgagaccagcctggccaacatggagaaaccccgtctctactaaaaatacaaaaattagctgggtgtggtggcaggcacctgtagtctcagctactcgggaggctgaggcaagagctgaggcaagagaatcgcgtgaatccaggaggtggaggttgcagtgagctgagattgcaccattgcactccagcatgggagacaagagcaagactttgtctcaaaaaaagaaaaaagctgtctatttagaaagtttttactaattttattatgaaaatgctctgagacacagaaacatagaatgcattctataatgaacacccatttttaccttccacctagatttgaaaatgtatattttgctttttctataaaatacatttttttgcgataccatttgagagttaagttataaacatcatatcattttgcccctaaatcagtttgtatctcctaaaagtaatggtaatacatatacccaaagtactaaaatcacaccctaaaaattaacaattccatagaatcttataatatccattccatgttgaaatttccataattgttccaagaatatatttcatagatatttaacaaggatttactctccagatcatacattgtaacattttggtggttctgtcactttttttttttgagacggactctcgctatgtcgcccaggctggagtgcagtggcgtgatctcggcttactgcaacctccgcctcctgggttcaagcaattctcctgcctcagcctcccgagtagctgggattacaggcgcctgccaccacgcccggctaatttttgtatttttagtagagatggggtttcaccatgttggccaggatggtctcgatctcttgaccttgtgatccacccaccttggcctcccaaagtgctgggattactggggtgagccactgcacccggcctgctctgtcacttttaaactgaacagcccctcatctttatgtcattttattggcttttagaagagtccatcacagttgtcgtagaatatcctggattctgggtttgtcgtattttatttctgcataatgttgttcctctttttcctctgtctccaaactgaaacttaaacagcagcttgatttgcttctggtcaaacatttttagcaagaatacttcataggtataatacagtctgtacacacaggaggcatataatggcaggttgtccttttattagtgatgctacatttggttaaggtagtgactgccagatctctccattgtaaaggtatgttattttctttgcaattagtaagtaatttggtgataatttgcacctcctcttacaaatttacaatcatctacatgtataatacaagtcatggattaaactggaaatcaaaagttaaatattgatttaacagaaagcagtgatattgaaatgcctacatattgaaatctgtaggatgtggccaagactctactcagtggtaaattaacatcccttaatgcatacagaaaaccacgatttggggatagaacattttgttctctgtatcctcaacacgactgtgacgccttttgcatagtaggcacttgataaaactcgggaaaaaataagtatttaactcaagaaacaaaaaaaggtaccaaataaagcagatgctaaaagaaggaactagttaatgcaattaaaattagaaattaagtaataagcagattatagacttattcaatttttccaaatccagtaaaaagaaaaaaacgatgacacagttataagtgtcacgaatttaaaaaggacattaccagagatatcgatgtcatcccagctactcgggaggctgaggcaggagaattgcttgaacccaggaggcggaggttgcagtgagccgagatcacgccactgcactccagcctgggcgacatagcgagagtccgtctcaaaaaaaaaagtgacagaaccaccaaaatgttacaatgtatgatcctgagagtaaatccttgttaaatatctatgaaatatattcctggaacaattatggaaatttcaacatggaatggatattataagattctatggaattgttaatttttagggtgtgattttagtactttgggtatatgtattaccattacttttaggatgtcaaattataagaaagtagtatcatttcaatgtatataaaattccagagctaatgaagtcttttctagaaaatgtacttcattgaaatttacacaacataatcatgcttgagtgaactagtaaatggaaaacgtaaattcagcttaagctatagaacaagctagaacaacacagtctgctagcacaatctgttttagtttaataaaaacttcaaggataattgttaccagaattttcccagctcatgatacatggctgacataatccaaatgataaaactagagagaatagttactaaaaaccaaaatttaaatgagtcctaattaaagagaaaaatcaaaatgctaaataaaatgtcagcaaaatgatacaatttttcagtaaatatatctgaaatgtgcaggcactggaatattctggttctatacatatgcagcttaaattatggaaaaagaattgctacagtcctattatcatctagattcattatcatatatatatatatacacatatatatatattagccttactatcactgatacctcctgatttcatcaatgctaaaaagccccacccaaatctcatctcaaattataattcccacatgttgggggagggaccctgtgggaggtgactggatcatgggggtggttccaccatgctgttctcatgatagtatgttctcatgagatctgatggtttaaaagtgtttggcagttctccacccccctctctctctcctaccaccatgtaagacatgccttgcttccccttcaccatgtgctatgactataagtttcctgaggcctccccagcaatgtggaactgtgagtcaattaaacctctttcctttataattactcaatctcaagtagctctttatagcagtgtgaaaatggactaatacaatgtcttgtgaaaacgttcattgatatttttagtaagataagccttgtgccagtatcaaagcattttatatttgatgggatatggtgtatgtatatatacacatgcacatacacaaaccagacacaaagacttatttgaatttaatgttcacaagaatttcctgaaaacaactgtcagggcaaaggcattttaataatgttttcatttaattttttttttttttttgagacagcattttgctctttcacccaggccagagtgcagtggtgcgatcttggctcactgcaacctctgccttctggtttcaagcgattctcctgcctcatcttcctgagtagctgggattacaggtgcctgccaccacacccggctaatttttgtatttttagtagagacggggtttcaccatgttggccaggctggtctcgaactcctgaactcgtgatctacccgccttggcctcccaaagtgctgggattacaagtgtgagccactgcagccagccctaaatttttataaatggtattgggactattatatacacatgcatatacacacacacatataaacagctcccgaaaatataaacaacttttggtgaattaggaacaatggagaatacctgaaatagaggaagcactggtattagatcatctaagggaaccagaaaacaaaacacaagagtgtgcactactttgaaaggtgaatgtgacataataagggtggcctgggcctagggtttgtcacaagaagcaaaagtggggacagtgagattgtcctcacaaccaatagtgagattggttgcttggggaagtaaagtgatttaacctggcacatcaccttcccttaacccagttagcaagccctagtccctgcttccaggaggaggaggtgaggccactgactggtattgtcctaggggaaataggagcatccctatgcctggggctagcaggccaggcatgctgcagcacaaaaaacctgccactcctctgtctctaaaaacaagtcagagtgcacatcagagcagcacatcctattcctgcactgaagcagactacatccaaagtactctccactgtgaaactaaacacatatcagaattaccaaacatttccaaaaaagctgactcccatataatagagaaacaatgctgatccaatgggaaatactataaaggcagtagtagaataaatgaaacgggagttttgtttaagtacgaatattaagagtaagtaggaatagcatcctcaaaatgatatgatgggaaatagcaaatctctataacaaaatcaactagagattacaaaaattacttaaatgtccttgtggaaataaaatctttaatagagggacttccatttctgggaaaatggaagagatgtccttttccctgttcctcccactaagtacaactgaaaactctgaacgttatatataaaacaaacacaagatgactctgaaaggtggagagaagagagcagactggctagggaccacaggacccaagaaatgacatagtcgtgaagttccatggactttatttatatcccagacttggagctaaagaagctggcaaccctaaaatgccaatattcagagatggaaaaaaaaattctaaagaaaagcctactctgtatagctaaagaaacaggaaagggagtctagcaagacaggacactattattttattttattttatttattttttgagatgagtctccctctgttgcccaggctggagtgcagtcatgtaatcttggctcactgcaacctctgtctcctgaactcaagcaattctcctgcctcagcctaccgaatagctgggattacaggcgtgcaccaccatgcccggctaatttttgtatttttagcagagatgaggttttgccatgttggccaggctggtcttcaactcctggcctccattgatctgcccaccttggcctcccaaagtgctgaaattacaggaatgagccaccacgtccagccaagacaggaaacttttaaataaccccttacttcagccaaatgccacagaaaaatctgtggccccaccaccactcttaacaccaaaggccaagtggagagtctagacttttacctttataggctgtaacaaggtgtccaaacttcctgaccaagtagtctcagaaaaagcccagtgtgaaaccagggtctttcattttcatcaggcaataatgagcccctcctgtatggtgtcaatgccaactaaatggagaacgtggactttcatacctaatgaaaatattgttcaggaaagaaggagaaatcaagaacattctcaggtgaaacaaagctaggagaatttgttgccagcagacctaccataaaggaaaggctagctgggcgtgggttggctcatgcctgtaatcctagcactttggcaggctgaggcaggccaatcacttgtggtcaggggttcgagaccagcctggccaacatggcgaaatccccgtctctactaaaaatacaaaaattagctgggcatggtggtacacacctgtagtctcagctactcaggaggcggaggcaggagaatcgcttgaaccccagaggcagaggttgcactgagccgagatcgtgccactgcactccagcctgggtgatagacagagactctgtattaaaaaaaaaaaaaaagaagaagaagaagaagaaaaagaaaaaagaaaggctaaagaaaatctgagaacagaaattaaatattaaacaaggaatcttggaaaattaggaaggtagaagaaacacagcaaaattacgggtaatttccttatcttgagtttcctcaattatgtttgacaactgaagcaaaaattgtatcactcttaggtggtttccaatgtatataaaagaaatatttaacttgattataatttgggatgggtaagggaagggaaggtttctacacctaattcaaactggaaaaatgtcaaaccagtagactttgtaagttatgtatatataacgtaatgcctagcaaaagtgtgcaatcttttggcatccctgggccacattggaagaactgtcttgggccacacataaaatacactaacaataacgatagctgatgagctaaaaaaaaaaaaatcataaaacaatctcataatgttttaagaaagttcacaaatttgtcttgggccgcattcaaagccttgctgggctgcatgaggcccacaggccgcaagtcagataaacttggctacagctactgctaaaaaaattgatacaagtgatccacccaaaaacactataaataagaaaatggcagaggaggaaaccaacaactcatcccttcacaaaagcaatgaataaacaaataaaaacttacagaatcaactcttgaaaaatttagaaaccagagtaatctacttttttttttgtttgttttttgagacagagtcttgctctgtttcccaggctggagtgcggtggtgcaatcttggctcactgaaacctccacctcccgggttcaagtgattctcctgcctcagcctcccgagtagctgggactccaggcctgtgccaccacacccagcccagtcagggtttcaccatgttggccaggctggtctcgaacttgtgacctcaggtgatccacctgcctcggcttcccaaagtgctgggattacaggcatgagccaccacacccagcccagattaatctttttttttttttttttttttttttttttttttttttctgagacagagcaagactctgtctcccaggctggagtgtactcactgcaacctctgcctcccggattcaagcgattctcccgcctcagcctcctgagtagctgggattactggaacccgtcaccaagcctggctaatttttgtattttttgtagagacagggtttcgctacgttggccaggctggtctcaaactcctgacctcaggtgatcctccagccttggcctcccaaagtgctgggattccaggcgtgagccaccacgcccagccagagtaatctatttttgaagggcttcaaggtggctgactagatccatctagtactagcctcttccacagaaaggaaccaaattagcatatagataatcacactttgaatagatcatctgagggagaacactggaatgccacagagaagtgatgggaaaagttgaaagaaggagaggcagcctgcttggccaggagagtctgggagcctggagaggctccctaatgcagggaaacggttaagtgagagacccccagtggtccacattcccatcaatggctaatcttcgccaagggagaccccctctaccctcatgagccctgagactaacacaggtagctgcctgaagactgcacaagggcattgctccagagagggagtgcattttgggtcccacaaacccttgagtcctaagcagctgctgcatggcaccattttgatagcccaatccccaccagaatgcatcctgccctggggcccaacaggccctgcatctccacatccctggaaccccatcacatttgccacccatagctatcccagcagggatgaggcaggagccactggcagtgaccccacttcccacaagcagagtggtggctgcacattttcaggagcactaaggacaaatccactgcctgcattggccaccactgtaggcttctgcaggaccaagaggtgagcaaaacacatttcccccagctccctatggctgctaccatttgaaagcaactgtgatgtccccaatagcatggttgtagcacagctgctactccccctgcccctccgtgctttccattggtggcctggggataaccccatccctgcctaccacagtcagcacctgcaagcaccaccagatggctcaaggacagtccctggcctgagagtgccatccaggggtctggggatcgcccagcccagtccacaaccgttggcacctgagcactcctcccagggtctgaggtcaggcctacacaacctgccactaccaccacagctggcagccacctgcacacaccacctgcagacctggggacttgtctgcccagcccattgtagccactgccaacaccagcatggactgcataggttccagaaggttgtcccaccactgctactggcataggccacacaattcagctgcacagggggttagggacccacctaaccacccagcccattgctgccactcctggcactcaagcaagccacctgaaggcccaagaattggccacagtggctcatgcctgtaatcccaacactttggaagaccaaggttgttgtgggaagtcagggaccccaaacggagggaccggctgaagccatggcagaagaacgtggattgtgaagatttcatggacatttattagttccccaaattaatacttttataatttcttatgcctgtctttactgcagtctctaaacataaattgtaaagatttcatggacacttatcacttccccagtcaatacccttgtgatttcctatgcctgtctttactttaatctcttaatcctgtcagctgaggaggatgtatatcgcctcagaaccctgtaataattgcattaactgcacaaattgtacagcatgtgtgtttgagcaatatgaaatgtgggcaccttgaaaaaacaataggataacagcaattgttcagggaataagagggataaccttaaactgtgaccaccagtgagccgggcaaaacagagccatatttctcttctttcaaaagcaaatgggagaaatatcgctgaattatttttctcagcatggaacatccctgagaaagagaatgcacacctgggggtgggtctctgacctggccccccgggcgtggtcatctcttatggttgagactgcagaggtgaaatagactccagtctcccatagtgctcccaggcttataaggaagaggaaattcccacctaataatttctggtcagaccagctgatctcaaaaccctgtctcctgataagatgttatcaatgacagtggtgcctgaaacttcattagcaattttaatttcacctcggtcctgtggtcctgtgatcttgccctgcctccacttgccttgtgatattctattaccttgtaaagtacttgatgtctgtgacccacacctgttcgcacactccctccccttttgaaactccctaataaaaacttgctgggttttgtggcttgtggggcatcatggaacctaccgacatgtgatgtctcccccggatgcccagctttaaaatttctctcttttgtactttgtccctttatttctcaagctggctgatacttaaggaaaatagaaaagaacctacgtgaatatcggggcaggttccctgatagaggtgagaggagcacttgagcccgggagttcaagaccagcataggcaacatggcaagaccccatctgtacaaaaataatttttaattagctgggtgtgatggctcacgcctgtagtgatggctattcaggaggctgaggtgagaggactatttgagcctgggaggttgaggctgcagtgagccatgattgcaccactataccccagcttgagtcagagtgagatcttgtctgaataaaaaaagaaccaatctgcctggacccctctaacaccagtgccagcatatgctaccgtgggaccaaaagacaggcatgctcagcccactgctgccaacaatggggcctggagactggtccatgtggctggcaacccagtcccaagtaaaacttcaccacagcctacactgacaacagcaccctgagccactgaggaaatcacagaaaccactgacaccgtttgcagttgaagcaatcatacagagactacactacttcatgcacctagaatcaaagacaaggtgcctatccaaccaacaccacagatacatcttcaagaaaaattcctcccctatgaaagcaaattcaaaacattggaagaagcaactattacaccagatgtgaagatctcaatgtaagaacacaagaaacatgaaaaagcaaggaaatatgacataaccaaaggaacacattaattctccagcaaagatcccaatcaaaaagaaatttataaaatctgaaaaaataattcaaaatatttatcttacttttatttatttattttgagatagggtctcattctgtcacccaggctggaatgcagtggtgtgatcatggctcagtgcagcttcgacctcccagccttgagtgatcctcccaccccagcctcaagcggtcctcccacctcagcctccagaagggctgcgactataggcacacatcaccatattccactttttttttttttttttaattagagatgaggttctccttatgttccccaggctggtcttgaattcctgggctcaagtgattctctcccgtcagcctcccaaagtgctgagattaccggtgtgagccactctacccaaccaaaaatactgattttaaagaagctcagtgagacacaagataataatgaaaaacaaaacaaaggaatcagaaaaaaaccaattcaggatattaatgagacattttcaaacagatatcatttaaaaaaacaaattctggagctgaagaattcactgaataaaatataaaatacattcaaaagcttcaacaatacactacatcaagcagaagaaagaatctcagaacttgaagacaagtcttttgaaataaccctgtcagacaaaaaaaaaaaaaaaaaaagaatttttgaaaatgaagaaaacctacatgacatattgggacaccaatataggagaacaaatattagaattttagatgttccaggaggtgaagagaaaacaaaagggctggaaaacctatttaatgaaataatagatgaaaacatcccaagtctagcaagagagatttgaacttgcagattcaggaggctcagagatctccaaatagacccaattttaaaagatcttggccaaggacagcagctcacacctgtactcccagcactttgaaaggccaagacgggagttgttcaagaccagcctgggcaacatagcaagactccatctctacaaaaaataaaataattagctggatgtggtggcacatgtgtgtagtcctggctatgcagcaggctgagacggaaggactgcttgagctaccattagagctcaaggctgcagtgagctaggatcatgccactgaattccagcctgcgccacagactgaggccctgtctctaaaaaaaaaaaaaaattaaaaattaaaataaattaatttcaaatataatgatattgataagttaaaagagaataggaaaaaagatacaccatgtaaatactaaccaaaagaaagctgagtggcattactaatatcagaaaatgccagtttcagagaaaatcagagcagagattatgaaattatacaaaattatttaaaaaagacctggtgcagtggctcacgcctgtaatcctagcactttgggagactgaggtgggcggatcacttgaggtcaggagtttgagaccagcctggccaacatggcaaaaccttgtctctactaaaaatacaaaaattagccaggcgtggtagcatacgcccataatcccagctactcgggaggctgaggcaggagattgcttgaacacagggtgcagaggttgcagtgagccctcaaaaaaaataacgaaaattataaaaagatcagttcaccaagaaaacataataatcctaaatgctatgcctcatatatcagagtttcaaaatacataaacaaaaagctatcagaactcattatagttgagaacttttatacatctctctcagcaattgggagcgttctcaaagttataaagggcctgagttgggggaaaaacacatctatagtgcagtcatgaaaatgtagcctcagggaaaagatgaagccaatgtttattctttctgtgaaacagcagggcctctaagaatctgtcatttttgggccaggcatggtggctcacgcctgtaatcccagcactttgggaggctgaggcgggcggatcacgaggtcaggagatcgagaccatcctggccaacatggtgaaaccccgtctctattaaaaatacaaaaaaattagctgggcgtggtggcgggcacctgtagtcccagctactcaggaggctgagacaggagaatggtgtgaacctgggaggcggagcttgcagtgagccgagattgcaccactgcactccagcctgggcaacagagagagactctgtctcaaaaaaaaaaaaaaaaaagtatctgtcatttttccacagtggcctcttagggagcacaataaagagaagagcctgtggtgtgtcttttgtttcatttaatgaaccctaataaaattcacagtatacacagaattttcaagagaattgtactacttgatgcactacaagcttgagcttacaggggcagaaacggtacaaagtgagaaaggatctttgggttcccaaatatctacaagaaaaaagtatgagaatagtactcagttgtaaacatgggctactttttatgaagaaaaaaaagaaaaccccagcgtgactcagaaagtgcaaccaaaagatcagatggcaggacaagagccatagaaaatcatttccagggaacgctgatcaaggagctggttatgtgtgcccagccagatttcagaattgttacgattagcaatttccttcaactgttttacccaccaactttctgaatctgaatgcttattattctatggctgttccaccactggatgtgggtgtgtcaagaaactgtagattgaagttagttcccaatattgtggactgagagggctcatactcaaggagtgtatcccaggaactgcactgaaggaggcttatccacacctggacttgattttttttctttccaaatttaattttaggtgcagggggtacatgtgcaggtgtgttacatgggtaaattgtgtgttgtaggggtttggtgcagattattcatcacccaggtaataagggtactacccaagaggtagttttttgattctcatcctcccaccctctgtcttcaagtagtccctggtatctattgttccctgccttgtgtccatgtgtactctgtgtttagctcccacttataagtgagaacatgctggttttggttttctgttcctgtgttaacttgcttagaataatggcctccagctccatccttgttgctgcaaaggatatgattttgttcttttttatagctgtgtagtattccatggtgtatgtatgtatgtatgtatgtatgtatgtgtgtgtgtgtatatatatatatggtgtatgtgtatatatatatggtgtatgtgtgtgtatatatatatacacacacacacacacacacattttctttatctagctgggtttgatttagataaggtcctagacttcaaattgatactgtaataggatgagactttggaagcctgagggaagtgcatgagtgtattttcatggggcaggatgtgaatggtggccaggaggcaaaatgtggcagactgtatttttcaaagatggatacaataatatttcccatcccacatggtcttctacagtatgttcttagcacttttccatcaagaggtaaactcaaattccccttcctttgaatttgggctggatttaagtctcactagtaaccattaaaatgcagaagtgatgctgtaatacttccaaagctaggtcagaaaaggccagcttccacctggttctcttagaatgttcactcttgggatgttcatcttggaataaacattctgtgaaaaatctgtgaccatgtaggtgttcctgctgccagttctagctaagattggtattcaagtcctccaagtccaaaattcaagcatgagagagaagaagcctggaagtggatattctagccctacctggactagtcattcaaataaccccagctgagactccagacatcatgaagcaaagaaaaaacatccctgctgtattctctctggatttttgacccacagaacctatgagcataacatgcttgtcttatggcacgaagttttgggtggcttgttacgcagcaatcatcagagcacttaaacccttctcaaaaagaaccactggaaagttataccaaagagtaataaaatggttttttttaagagggaattgatggaacagattgtatggaacacaaactgatgcaaaatttctctgaacacattttatgtttttaactttaaaatcatgaaaatgttatagtctttaaaagtaaaattgaatcagaaataaaaatggcagtccttgaacactgaaaataaatagaaacgaatgaatctagctggaaatcaggttggttagaactaagcattttccctctacattcgtagtgaatgatatttgaaggacggagagtgatgccaagaaatcttcaacttcattcagcattcatgtttggtagtaatgctcgtattctgttgtaagtattttatactgtttatagatcacagcacatacattagttcattgttaaaatccaacaagatgttcaggggaaaagcaaaagacgcgagaataaaattaaagttaaaaataatgtggtattaaatttgaattggaagtatcaatataaactcagtttttattctcctaagttaaaaaaacttttaattgaactataataaacgtaaagtatacaaatgtacaactcaatgaattttcacaaactgaatacatcagagtaatcagcacgcaaatcaagcaacaaaacattactagcatctacagaaacctcccattgctcttaccatcactatccctcctgccatgtacccctacccccctcacccccaccagtatcttttttttttttttagagacggagtctctctctgttgcccaggttggagtgcagtggcgcgatctcggctcactgcaagctccgcctcctgggttcacgccattctcctgcctcagccacctgagtagcggggactacaggcgcccgccaccatgccccgctaattttgtttttgtatttttagtagagacagggtttcaccgtgttagcccggatggtctcgatctcctgacatcatgatccgcccgcctcagcctcccaaagtgctgggattacaggcgcccgccaccacgcccggctaattttttgtattttcagtatttttttttttttttttgagacggagtctcgctctgtcgcccaggctggagtgcagtggcgcaatctcagctcaccgcaagctccacctcccgggttcacgccattctcctgcctcagcctccccagcagctgggcctacaggcgcccgccaccacgcccagctaatttttttgtatttttagtagagacgggttttcatcgatctcctaacctcgtgatccgcccgcctcggcctcccaaagtgctgggattacaggcgtgagccacggtgcctggccgtatcctgacttctaactacattaaaaagttctcaatttttgtattccatataatcatatagtatgtcctcttttgaaggggtgggttgcccctccacacctgtgggtgtttctcgtaaggtggaacgagagacttaggaaagaaaaagacacaaagtatagagaaagaaataaggggacccggggaaccagcgttcagcatatggaggatctcgccagcctctgagttcccttagtatttattcatcattcgtgggtgtttctccgagagggggatatgtcagggtcacaagacaattgtggggagagggtcagcagacaaacacgtgaacaaaggtctttgcatcatagacaatgtaaaggattaagtgctgtgcttttagatatgcatacacataaacatctcaatgctttacaaagcagtattgctgcccgcaggtcctacctccagccctaaggcggtttttccctatctcagtagatggaacgtacaatcgggttttataccaagacattccattgcccagggacgggcaggagacagatgccttcctcttgtctcaactgcaagaggcattccttcctcttttactaatcctcctcagcacagaccctttacgggtgtcgggctgggggacggtcaggtctttcccttcccacgaggccatatttcagactatcacatggggagaaaccttggacaatacctggctttcctaggcagaggtccctgcggccttccgcagtgtttgtgtccctgggtacttgagattagggagtggtgatgactctcaaggagcatgctgccttcaagcagctgtttaacaaagcacatcttgcaccgcccttaatccatttaactctgagttgacacagcacatgtttcagagagcacggggttgggggtaaggttatagattaacagaatctcaaggcagaagaatttttcttagtacagaacaaaatggagtctcctatgtctacttctttctacacagacacagtaacaatctgatctctcttgcttttccccacactcttttatgtctggcttcttttgcccagcattatgcttttgagatttatctgtattgtacacagtcataggttgttcattttcattgcagtatagtgttgattcagaaattttatttctgcagaaaagcaacagttcaatattcagaaagaacaggtgactttagaacatgatgccacatccagggaaacatacctcacatccaccttccaacacaactaaccacctgacatgaggtccgaactttccacctttgctgtcacctgttttggttacagcacttatctgttaaaatgggttcatatcccatactcacaagcattaagagtgaaagttacagggtaaaaggtgcttcagatacattaagttaaataaaatcaattaaactctcattacttcattatttggagaagctatagttttattttcttaattattaattttaatatgctcatttaaccacagaatgctttctaaaaataccatcaagcactagtgtttcctgggaaatggtttcaaatgctatcaagtttcatattccatttgagaaatggaatataatgatgtaatacactgaacatcatggcttcccaattataacagcaaatacagttcataatggatgaccacggtgaaatcaccgaagtccaactgatgcaatcatttataagaactctgtctttattaattttgagaaggtaattttaaggtgttgggttacacttttacatacataaaattcattccattcttaatacatagaaagctaaaaaaaaaaaaaaaaaaaagacaataagcatgaattgagatgatactgggccagaatcgtatctcttttactatcattatgatgttctgaaggtagaatgcctagaatctaaatatataattaaagctggatggatctggtccaagttattccacataaatgattttctattctaaactgttggatataatttcccatagaaattagaattaccagatttctcttcatacggaaaatgtctagattttcgttttgccagccctcctcacctagttcttataatcagttttaggttagtcttgtagaatagtatgttggaaaaatttagcaattaccaattcttcaaagattttacttgtaaaaaattaggttctcggagtctctctgagaccactctggctcaggagagtaggattttttttttttaaagttagattctaaatgtattcttttagaaagcgtatcttctaaccgtcttaatttttcatttgtttgttggtctactcaggctctcttcattcagcatgtgaagtcaattttagtaatttttaccataaaataattctggattttcaatattttaaaatacatgtatagtgtgtgtataaatataaatatatatacctacacactatacacacacacattacatatatgtagtatagcaacttataactttaaaaatccatagctgtcacttttatcattcatatagctgtagctgtgtaatctttcatatttctgtgatcaaaactgcaaaggtcttgactatattggtatcttttaaagaaacacacacaaaaaaaccaagtctactttttattgtttatgccagcgctgacaatagaaatacgtgagctacatatataaattttcctataacaattttaaaaacaaaaaagtgttattcattttaatgtattttatttgaaccaatatatctaaaatattatttcaatatgtactcaatatgaaaaattgagatacttaacttttttaaaataactaagtcttcagaatcttgtgttttacaaaaaaacaccatttgaatttggactagccacatttcagtgctcaataactcaatttcaagtgctcaacaggttgctagtgactaccatatattagtacaggtctagtccattatttcccacatttagcagtagtaattgctttcttttactcattctttaaacatatgaagtgagagtcgggcatggtggctcacgcctgtaatcccagcaccttgggaggccaaggcaggtggatcacctgaggtcaggagttgagaccagcttggccaacatggtgaaaccccatctctactaaaaatacaaaaatcaacctggtgtggtggcgggcgcctgtaatcccagccactcggaagtctgagggaggagaatggcttgaacccgggaggcagagcttgcagtgagccgagactgtgccactgcacgccagcctgggcgaaagagcgagactccgtctcaaaaaaaaaaaaaaaaaaggtgcataccatgggtactataatatagagatagagaggtcaactaaataaaatgtggacctacattttaacttcctgaatacattatcgtcattatagtgtaattaatattccaatcccaatgtgtagagctttggcaacatccacaagttttaatatgtagaaattttctttttttctttgagatagagttttgctcttgttgcccaggctggagtgcaatggcgtgatctcggctcactgcaacctctgcctcctgggttcaagtgattctcctgtctcagctgcccgagtagctgggattacaggcgcatgtgaccacgcctggctaatttttgtatttttagtggagatgaggtttcaccatgatggtcaggctggtctcgaactcctgacctcatgatctgcccaccggcctcccaaagtgctgggattacaggcatgagccaccgggcccagccagaaattttttttaaaataattcattttaaactggctataatttcatggataatttgatctttaaaagaacatcatggaaaattttaaatacacaaaagtagaatagcaaaaacaaaacaaataaaaaccatgtatccaagacttaggttaccatcattttgccaaacttgttattcatcctcatttttcttttgtatgaacaaaaggacattccagatatatcatctcctgtgtatagacttcagaaattatctctaacaaatacacttttacataaccacaatgctattatcacacataacaaagtttcttaatattatctaatattgtcaatattccattctcccaattattgttaagtatctcttcttttacatgtttgttcaactcatgatctaagtaaaaaccactgtttcattgcatttgactgatgtctcaagtctgtcaatacctaggagttccaccttatttcttaaaatgccattttattggttgggaaaccaggtgattcctcttgtagaattacccttattttagatttaattgctcctttttgtgtcatgtaatttactcttccattccttgaattttctctaaactgggagttggctcttgaggcttaaattcaggttcaatatttttggcaagatgtgtatatcttactgtagcacattaggaggcacgtaatttttactctcttgctttttgtgaagttgagatgatgagtgggttcagacgttgtcagtctcatctattcactataaagttcacaaccttcactgaatggtgtcaacctgtacagagaatcatgcctagatccattatttcattatgtgttacacaatagtttttctaatataattttctattattctttctgcattcattagcctggaattttctaataaagaagaactttacctccttaacttctggttgccctgaaatacagttcctacaggaaatgcagactaaatgactttcctttcatttacacattttcagaatgaagtggttccctagcaaccttcgtgtgtatatacacagatggaagaatatggagataataataggtaagatcaaaagcttttccacattcagtcctgtaataaagttcttttctaggatgaatttcctaaagtttaacatggtttcaaaggtgatgaaaggcttctatatgttcattaacatattctttcctttaaataaaacttcctatgcttagttgtgagcatgaagcaaaagggattcccacgttcaaaaacctttcctctagaatgtacttcctatgctcaacataaaattcgcaaaggaagagttctaataattattaagttacattatgaattcgctgatggtaagtaagatgtgaatgttgtctaaatgcctttttacattccttacatttgtatggtttctcaccagaatgaattctctgatgttgaatcagtgatgaatgaagtctaaaggcctttccacattccttacagtcatagggcttttcaccagtatgaatactttgatgttgggtaagttgtgaaagcagtctaaaagtcttctcacattccttacacttaaagggtttctcaccaaaatgaatactctgatgttgagtaagctgtgagaacagcctaaatgccttcccacattccttacattcataaggtttctctccaatgtgaataccctgatgtgaaataagttctgagtaacgacgaaagaacttctgacattccttacattcatagggcttttcaccagtatgtattctctgatggagagttagatgatagccacgactgaaagtcttcccacattccttacaatcataaggcttctcaccagtgtgaattctctgatggagagtaagttgctgccgcactctaaaggcctttccacactccttacattcatagggtttttctccagtatgaagtttgtgatgtagtcgaaggcctgtactacacagaaaggcctgaccacattccttacactcatagcacttctcagcaatgttcagtctctgatgtcgagtaaggtgtgcatactgcctaaaggccttcccacattctttacattcatagggtttctcacccgtgtgaatcctttgatggagattaagttgtcctctaactctaaaggctttcccacattctttacattcatacggcttctcaccaatatgaattctctgatgtactcgaaggtctgagccacatgtgaagatctttccacattttttacattcatagagtttgtcagaagtatgaattctctgatgtcgactgaggtgggcacactgtctaaaggcttttccacattctttacattcatagggtttctcaccagtatgaattctttgatggaaagtaagttgttgtcgtactctaaaagccttcccacattccccacattcgtagggtttctctctgttatgacttttctgatacagaggaagagatgtgagttttctgtaagtaggcattttttcagaggtggtttttgtcacttgcctgaaacacacctcatgaggactttcttgttcttcaagtccacagcttttaattctttccattaccttccactgagataagttcatttcataaatatcctttccttgaaataactttttagtgtcatatctggattccaaatctgaaagaaaacaagaccaaaacatattttcctgttctacacaaaataaacaaacgaaaactttataatagaaatcggtgaccaaaaaaaaaaaaaaagaaaaagaaagcccaattgaagtaaatgggctcaaaatctctaaaataggtaatttaaaagaagctaaaaggaaataagaaaatgatgagttaagaccaggttatttgggtgcagatcaaagtttgagactccccacttaaatttttcaatttctcttttcagttagaatacagagcaaatactttatcaggagtaacatggactctgtcgaacacaaggtatcaactcaagccactgtcccctttgctgtccatgtccctatgacacttgcctgcctcctttctgctcctagaatgtgtcacaatctttcttttcttttttttttttcgagacggagtctctgtcgcccaggttgtagtgcagtggctcgatctcagctcactgtaacctctgcctcccaggttcaagcaattctcctgcctcagcctccctagtagctggaattacaggagtgcgccaccatacttggctaacttttgtatttttagtagagacagggtttcaccatgttggccaggctggtctcgaactcctgacctcaagtgatccgcctgcctcggcctcccaaagtgctgggattacaggcgtgagccaccacatccgacccaatctttccactttttggagcttttcactggctattaaatctcccaggaatcctgacttgggtttgcatggttgggtttctttcatccatcaggtttcattttaaaaatcagaaaaatgatccctgctgacttcatgtaatatatatcctttgttttctatcccagtcacttctttcttttttctttttttctttttttttttttttttaaagacagagtttcgctcttgttgcccaagctggagtggaatggcgcaatctcggcttactgcaacctctgccttctgggttcaagtgattctcctgcctgagcctcccaagtaggtaggattacaggcatgtgccaccgctgtatttttagtagagatggggtttcaccatcttggccaagctggtcttgaactcctgacctcgtgatccacctgcctcggcctcccaaagtgtcagaattacaggcgtcagccaccgcgcccagcctacttctttcctttttttttgagacagagtctcactgtgttgcccaagctgaagtgcagtggcatgatctcggttcactgcaatctctaccccagggttcaagcaattctcgtgtctcagcctcccaagtaactgggattacaagtgcccgccaccacacctggctaatttttgtatttttagtagagacagtttcacaatgttggccaggctgatctcgaactcctgtcctcaagtgatctgcccgcctcagcctcccaaagtgctgggattacaggtgtgagccaccatgcctggctacttatttcttgctgaacacttttctcaactgggttgttattcattaatttctccacttattattctctttattttcttaccttaaacttccccaagggcagaaacaatttttcactcaccagtgaatagcaaatccacagtacatattaactgtgaattaaattctcataattagtcaacaattatggcatatggtatcctgcctccaatcttaaaccttactacactgattaaacattctttttatcacttcctacagagatgggaaacaagtacatctaagctatctcagtaaaatatataaatggaaaatagtgatttctttacacttcatcatccttccaattgcctcttcatgtacacttgcagatacctccactgcagttcaattcctactttgcataatcataagtgaactttgccccctttcacgaccaaggtaataagagtctctaaatatttatctttacttgagtttacgtaacttgcacatctatgttacaggttccccgtatcttcctgaaagtccccataatgccatttgtgtacttcctagagaatatttcagtgattttccaggtgtaacaacaggtttatactatggtaaaaggctagtaaaattctgagcaaagagatgttttttgcaaatgcacctgttctcaaaatctttgcaataggaattcaatactcttcaaaaaggaaaaggtattttaaataatgttgctttagggttagggttagagttagggttaaagcaacgttatttgtaatatacccaaactggaaagagtccaagtgttcatcaatggaagaacagctaataaatgatggcatattaatacatcgcaatactatacaacaacaagaattaacaaactacaactacatgcagcaagggctaatctcaaaaacataatggtgaataaacaaaactagacatacaacaatctatactgtacaattccatttttataaagttaaaaaatgataattaataatctatggtggtgtcaggacagtggttagtcttggtggggaggaatgaccgaaagaagtcaagaggggcttctggtatcctagtaaagctctatttctgaatctgtgtactaattagatgggtgtggtcactgtgacaattcactaattatctgtatatttttgtatatatttatatttcaataagtttacttttaaaaagtatacgctaaaaagatagtaaaagacaacaataatttaaatgctgtggataaaatgtgaccagggacaggtaaatgaatggaacagaaaatactgctatataatcgtgtttctctctctctgtctctttctctgtctccccatccaaaaaaagcaatacaaaatatggcagttgtctagaattttggggataaagtccatttatggcctcaataagacaaataagatataagtgatattaataaaagcatcataattagctaaataatggtagtaaataagtaagtagttatgaaggtaatacaaaggttaagaaataagatgctcatttcaaaggatttacctgcaaattaaaaataaaaccagtaatctaaaaggaaagccagtcaaaaatcgaattaaaggctaaaacattcataagaaagtgagaacgtgttactgtttatagcattaaagtccacacaaactgggcaccatggctcgcacctgtaatccccaactacttggggaggctgtggtgggaggatcacttggggtggaaggattatttgaggccaggaagtcaagaccagcctggccaatgtaatgagaccccaatctcgaaaaactaaaattaaaagaaagaaatttaagcccatacaaattggcataagaaataataaacaatggaaaaggtaatggaataaaggaagtgagaagacaatggaaaagtaaatataagcataaacaaattaggacaaaatgtctgtattcactaataatcaaattagaataggttgtaaaatttatcctgtaaaatttgaaggttttcataaaaaaaaaaaaattgccagtgttgataaggtgaacttgagattgtcatatatggctccctacttaagtgacaagccagatcaagatcttggtattttgaacattctcagttagaaggctgttctataatatacacagctgagctgtacgctaccaaatagccatgtttgttcccaagtttgcctattacagttcttactgctgcaagcaactaaaattattaatgtttaaagacaattatttctatgaaaactaagttggatgtttcgtagtattggctatacataaacatttcatttttgtcaacgtaggcatgggtgagaaaatagtaaaagacagaaaacataaaaattcaagaattctgccctcagattgcttcacaagtatctttacattcctgttctacttcaaagaagttgaaatgggaaagaatagcctatgtttcataagtactttaatcaagacagaatgggctagacctacactgaaacaaaatgctgggccaaacatcaaaagattggactatgatagacaattttaatgttctacctccaaaaacatgtatgtaaaatatgtatatattttaattttaatattaacattatttaattatataatactatataatttaatattaactaataaaattaataagccaaatactagtttggattctactgaatcaaagagtttagtctagtaagcactgctaatgtgaaaacaaaatattagtccatcttagatcaaaatgaaagaagtgttatttccatttacagggcatcagctttaattaaaaataaaataggggcagggtgtggtggctcacacctgtaatacaagcactctggcaggccgaggcagacagattgcatgaacccaggagtctgaaaccagtctgggcaacatggagaaacctcgtctcaaaataaaataaaataaaataaaataaagtaaaataaaataataaaataaaataaaatagggagcaaattatcttgtcatccccggaggtatgctatttcctgaggtataatgtctcccccaccccttttttttctggctgatacaagattatacaggatacagaatatttatgaccaagacaattctaattatattaacatcagagatctgaaaatgttaaaaccctatgaccacaaaattgtacttctgaaaattaacactgatctaatactgcataatccatactgaattccaatgaaatactgaataatcctcaggttcagacgataatcttactgccatttcaccaaggaaccagaaacaactgaaagaaaaatatgtattctcttcaccacattctccaatcaatctatgtctgaattcttaccatatatgtggttttacttcatcaattggttccactccttcccatctactgaaggtcgctgcctacaaaactaccctctctctctacttcatcaatgttcctctctttgaaatcattctcgtagcctataaacatgttctaatatttcacatcgtaaaatatattccttgtactcttatgtatctgcttcccttctatggcaaaattcatccaaagaatagtttaaccttattttcatcattgcctcaccaccattttctttttatctctcagtaactctaaaacaaacaaatgaaaaacctttataacagagcatttctaacatatcaaaaagtagacagaacggcataataatatctccatgtatccagcattaaccccatgcccaatcttggcctacgcacctcccaatctacttccttcgtattatttgaagcaaatcttggatattacatcgtttcatgtgtacaaagtttgcatctcaaaaagcacttttacacataaccacaataccattatccaaacccaaaaaatgaattattaaatatcatcaaaagtcaatgtccacacttccatctgataaaattttaaacaacctaaaaagaataactcatccaaacagagttcacagaatacaactgttgacgtgtcttttacatctcttttaatctataggttttcctatcatttatttatttcccttgtaatttatttgttgaagaacctgtttttggtcctgtagtttcccatattctgaatttggctcactacattcccaaggtgtagaacatagtcctctgtcttcttcccgtaagttggcaattggctttagatgcttgataagacttaggaccttttgttggcaaagttacctcataggtgatatcgtgctctttcattaggagaaacaacacccgattgcctctatttctttgatgctatcagcactgatattcaatatctaaatccaatagttcttatgggttccacaatggtaatattctatcatttcttcttcatttattcactgaacacttttattaagagaaacatacctccatctactacctattcatataattcttataagaaaggcaggataaatgcttcttttccttttaatttatgctttttaaatgttagttttctagtaactttcaatgatgaataatttgctgttagtatcaagaatttataaaattaagtgtattttatgcattgcaatacactgcagtcattatatgtaatgacgttcaaatagtcccatctttggccaactggagcctgaccaacccatctaaaattactctattcattcattataattctccatatccttaccttactcacttttcttcataatacctaattacttcaggatattttagtaatccatttactgattttatttacttgtttactgtgtgactccccactacaatttaaactccatgaacatgggcaatgaaaaaatgtatacataaaagtcaaaatataaaagatgagctagaaagggattagattcaaaatacaggtaaaatggaatcactagggcagaaagctttcctctactgaaataggggaaagaaaagggagggaaacaagatagaaaagaaacgactgaggccaggcgcggtggctcacgcctgtaatcccagcactttgggaggccgaggcgggtggatcacgaggtcagatcaagaccatcctggctaacatggtgaaaccccgtctctactaaaaattcaaaaaaattagccaggcatggtggcaggtgcctgtggtcccagctactggggaggctgaggcaggagaatggcgtgaacccgggaggcggagcttgcagtgagcagagatcgcgccactgcactctagcctgggcgacagagcgagactccgtctcaaaaaaaaaaaaaaaaaaagaaaaaaaaagaaacgagtgataagtggaagtatggatgaaatgtctttgatggctcatgctgagaagatctaaattttcttcccaagtttcaggtctcttcttcacaattgacatctaaggggtgtgtctcctcctcaaccagcaggtctggccatgccataatggctgacctctgcctgatcagcacttacctagagtccatcttcttttctcatccctcacaaccatccagggctctttcccttgttccaatagggtgatcacatctggcttagaaatagaacatcctgcttaaaaataaataatagaatataataaagaatttatttaaggcttcaaaacaaagaagactatcaggattgaaaaacattcatagcatagagttacttcaggatcacaaggaaaaacaagaacacagaagtagggacctggttttattttaatttaaacttacacaggctctgtctcttgagagaaaagaatagttgaaagcactggtttcaaatcctgcctctctttcccatgtcagtagagcaactaattcaatctctctgcacctcatttttctcagacgtgaaaaagggataacagtaatgcgtatatatagcattgttgtgagattcgatttaatgtaagtgtttagatgagtacctggtacatgttaaccatcatatatgttcatgaggtactacatttgctattttttgattttttttttaaagaaaaataagtttcttgccaggatatgcatacaatattaaatgcaaattcatgtattttaaacttaatcacaaagcagttaaaatatgtctgttgtaggaaactgaatactgtccacttgagttttaacaaactgtcaattcaacccagcatcacatacactgtaaaagctcttttaatagctatgtagagccagacacctctgtcttcctattctcactgtaaatgagttacaaataacatggaccatccatagcagtatgaaatcagattgttttgacaatggttttgccatgagtgtctaagaatttatatccagctgtcattaaagaccggtaataacagaaaagtcgaagaaaaatataacggtcactgaattatacagaaagatgaaggtgcttaatagtggtacttactgtcaaagcacaaagcagacatttagctagtttttagaaagacagcccagacgcggtggctcacacctgtaatcccagcactttgggaggctgaggtgggcagatcatgaggtcaagagatcaagaccatcccggccaacctggtgaaaccccgtctctacttaaaatacaaaaattagctgggtgtggtggtgtgcgcctgtagtcccagctactcgggaggctgaggcagtagaatcgcttgaacccaggaggtagaggttgcagtaagccaagattgcgccactgcacttcagcctggtgactcagcgagacttcgtctttggaaaaaaacaaagacagcccagaaattcagtcctgtgaatgtctaaattatctgacacagatatgctaggcttacccagtgacaccaagttgctatagttctctaatatcacatctctgtacaaattcctctgatatgagttcaggcattcccattcttcctgagaaaagtctacagccacatctctgaacatcaccaaatcctgaaatgataaacgcatgtattatttgtaagataaatgaaaatattttgaagatggaagaaggtggctgggtgtagtggctcaatgcttataattctagctttgggagcctgaagcaggaggactgcttgaggccaggagtttgagaccagcctagacaacataccaagaacttgtctcaaaaaaaaaggccggcgcggtggctcacacctgtaatccagcactttgggaggccgaggcaggcagatcacgaggtcaggagatcaagaccatcctggccaacatagtgaaaccccgtctctactaaaaatataaaaaattagccaggcatggtggcgggcgcctgtagtcccagctactcgggaggttgaggcaggagaatggtgtgaacctggaagacggagcttgcagtgagccgagatcgcgctactgcactccagcctgggtgacagagcgacagagcgagactccgtctcaaaaaaaaaaaagaaaaaaaaagtggaagaagggttttgatgatacatgttcacttcatacatcaaatgaatagactagggctggaagcctgtgatgtgggaaggtggcaataaagatgtgagtgtgactgaagcagaatatgtgttcttgaagatttctataaacaaaagaccagggtttggcaacattttctgtaaagggccaatattttaggctttgtataccacatatggtctctgttccacattcttctttttttttgtaacaattatttcaaaatgtaattagcttgcaggctgttccaaacaagctacagcttgtgggccagatttatagtgtatctagtttgcccaccactgctatggccaaaacttcctacgtactatggaataggagataattttatttatttccagacatattcgggtaattatcagaatttttcaattaactgaaataggttcataggaacagtacttgcaaaggacctaaaaaattctcaataaatgggatttactctatcttcttttcctttaaagatttttaaaaaataataataattgatggtattctccccaaaaaatgaactgtaaaatgcctatttttaaaaagtatagtttgcataaaacttaaaaatgtcttctagatgtaactttatcataatgtatcattagcatttttattataacagattctttatttaatatttacagtttactgcatgatacagtagttctcccttactcatggttttgctttcctcaatttcagttacccacagtcaaccatggtccaaaaatataaaatggaaaaattccagaaataaacaattcataagttttcaactccatgccattctgagtagcatgacgaaatctcacactaaccactccgccccacctgggatgtgatatgctttgtccagcatatcaacattgtatatactacctgattatcagatcaaaacaacatcataaatatagggttccatactatctgaggttttgaggcatccactgggggtcttggaatgtatcccccttgggtaacgagggactgctgtactccatctgatggatatgttacacttaatagtgattatatttagatatagctatacttttaaatatattatatttagaatttacattacaaaaaatatctaaagctgcttcaatgcccaatattctagtttagcaatatgtggatactgagcacttgaactgggactagtccaaattcacatgtgctgtaaatgtaaaatatataccagataccagatagtgaagactttagaagcaaaaaaacaaggtaaaacatattgatgatttatatatatattctttattttatcttggttttgaggcagggtctcactctgtcacctaggttggaatggcgtggcacaatcacagcccatttattgattacagctcactgcagcctcgaactcctgggttcaagcaattctcccacctcagtttcccaaattgctgagaccacaggcatatgccaccacatctggccagttttgttttgttttgttttgctttgttttgtttttttaagagatgggatctcattaagttgctcaaggttgtctcgaactcctctgctcaagtagtcctcctgcctcagccttccaattccaaagtactgagattacaggcatgagccaccactgtcagggcctgaccatgacttttatattgattacactgtgaaataatattttggccatattgggttaaataaaagacattaaaataaactacatgtgtttctttttactttttttaatgtgactactaaagtatttaaaatatttgaccttgcatactagtctacacttttaaaatttgactactagaaaattttaaattatatttgtagcttgaattacaattattttggacagtgctattttaatcctgagaatttcagataaaatgcccacttctaggaacttcatttctgccccatctctgctctagacagataaggagcacacaagagatgctgaatgatttggtcaatgcacacatggatactggtacaatttggctgtgtccccacccaaatctcatcttgaattgtagctcccataattcccatgtgttgtgggagggagccggtgggagataattcaatcatgggggcagttgcccctatactgttttcatggcagtgagtaagtctcacgggatctaatgattttataaggggtttcctctttctcttggcattcattcactctttgcctgccaccatgtaagacatgcctttcaccttccaccatgattgtaaggtctccccagctatgtggaactgtgagtccattaaacctctttttccttataaattacccagtctcaggaatgtctttatcagcagcgtgaaaatggactaatacagatacagatggagaagacaggggcacttaggaatctggctggctccatcccgtgctggaatggggaagactggggagaagctgttgaatggggctctgttagaaagttgcagaataacaaatgagaatgttcacataacctgaaaaaaatgacagaattccaaagtagagagaaattccaacttacacgagccatgattttagaactgctagaactggtcaattttcctcaaggttcatgtacttcagaagcagggtccacagacaccagagctgcagaaagaacatgtaaaatcatgagaagagaactgcctcagagtttccaaattttaaaaactggtactacttctccattcctatatgcaactcccacccccaacacacagacaagttttgataggtaagaggtagtttagacaaagatgtcctccccaaaaccacagcgaaatcagctcagctgcacaaggaattgaagagcagagactctgcggcatcaaagcatatgtctagacacttcagcaggagggctgccagttggtccccagctctgaccccaaggcgggctggtttggaccaaagaatgggttgtgcagacctgtcctgaacagatcctcctccctccatccccaccttcccagctgaaaaggggctacaccatctaaaccaaaacttccttcttggccttaggaatctggctggcctccccaaacatgaagacaaaaaatagcatagacaagaatttcccaaactttgctcaaattggaatcacctggatatctttaaaatatactgttgcctggctcccacccttaaacacactgatttaattagtgtgacgtgggatttaggattttttttttaactacctcctcctcccatgggtgcttataatgggcagcaaagtttggtagtcaaactttagtatgcatcagaatcacccagagggcttcttaaaacacaacttgctaggtctcactcccagagtttggcattcagtacgtctgggattggacttgagactttgcatttctaaaaagtttccaggtgatgctgatgctgctggtccagatgccacactttgagaaccacaggtataaaacacctgtagaaaggctatatagcagcctttattatggcaaaactgcaggtgcacattgggatcccttccccaaggcttaactcagagctctctgctccttattttcctattcaggatcatcaatattgcctgcatgatctcaattaccaagcaatctttcttggtactcagacttagagaagtaaatttatgaagcctgagtgtggataatgttctagaagctagaaataggctgggtgcagtggctcatgcctgtagtcccagcactttgggaggcccagatgggaggattgcttgatgccaggaattgaaaaccagcctcaacaacatagtaagatactgtctctaacaacaaaaaaatttttttaaattagctgggtgtgttggcacctgcctgtatccctagttacttgggaggctgaggcaggagaattgcttgagcccaggagttcagggctgcagtgagctatgatctttccactgcactccagcctgggtgacaaagtaagaccctgtctcttaaaaaaaaaaaaaaaaaagaacaaaataggaaaaagaaataacctatcagcttatcagtcaaaatctactcgtaactagagagcatattgaaggaactggattggcagatttcaaaaagctatgacacctcatagttactaagctgttggggaaatggatactcaatgatatgatgtacaaagaatgaaataatatgtggatagagtgtttaaaatgggaccaaaaaagctggaaagaacctaaatgtccttcagcaatgtcaaataaattatcatgcattcacacaatggaaaattaaacagccgagtgcagtggctcacacctgtaatcccagcactttgggaggccaaggcaggtgaccgcttaataagtccaggagttcaagaccagcctggccaacatggcaaaactccatctctacaaaaaattaacggggcatggtggtgcacacctgtggtcccagctccctgggaggtcaaggtgggaggatcgcctgagcccaggaggtcaaggctgcagtgagccccgttcatgccactgaactccagcctgggcaatagagtgataccccgtcttaaaaaaaaaagaaagaaaagaaaaaaaaaagaaaaataaacacccattaaaaatgaagataaaattcatatttgatgtcatgggaagatggccactacatattgttgggggaagaagacaggttagaaaatatgattgtaatgtaattgtatttcggcaggtaaactacatacacatgcatacatgtatatgcatgtgtataaaatgatctgtgaattggaataaaattttattgttacctttacttgatggtatcccagtcctaggtgatctttatttgttcttccctggaatctttacattttttttttttttaggcaggcttttgctctgtcgctcaggctaaagtgcaatctcggatctcagctcactgcaacctccacttccagggctcaagcgaccctcctacctcagcctcctgagtagctgggactaaaggcacatgacaccaccctggctattttttaccgcgatgcagtctatgttgcctagcctgctctcaaactcctggactcaagtgatccacctgcctccacctcccaaagttctgggattacaggcttgagccactgcacctggcctgaattttttaattaaaaatttttatcacttatacctgaacaaaaattcaaaacagctatgcaaggaatatcacaaaaagctccaacagttccatccctgctactctgccccatcttccaaatctagaggcagtaatttttacctctattagccattccttttggtatttaaaaaacatgctaatatttccacttctgaattttcagttgtaatcattacatattcacttactactataagaggcatagttttagctgtcttttacctactcaactcccacccacatatgcatagttgcagtccctttgtcctttcaatatgattttcttttccttttttttttttttgagacagagtttcactctgtcacccaggctggagtgcagtggcacaatctcaactcactgcaacctccgcctcctgggttcaaccgattctctgcctgtcccagcctcccgagtagctgggattacaggcacacaccaccacgcccagctaatttttgtgttttttgtagagatggggttttgtcatgttggccaggctggtcttgaactcctgggctcatgtgatcgatccaccagcctcggcctcccaaagtgttgggattataggtgtgagccactgcacccagcctcaatatggttttattctatttcagagtaaatcagtttttaaattcagtttacattactgtgactaaacattgttaccaactgaactatgcagtatactcaggttattttgccttttttgcatatgacttttttttctgagattaaaatgatcttgttttttgtaagtttagttttctaagaaattatcattaattcatttccccgaatcatgtaattgaaggatgaagctcctggtataaaatagcacagctggccgggcacagtggctcacacctgtaatcccagcattttgggaggccaaggcgggtagatcacgaggtcaggagatcaaggccatcctggctaaaacggtgaaaccccatctctactaaaaatacaaaaaattacctgagcatggtggcatgtgcctgtggtcccagctacttgggaggctgaggcaggagaattgcttgaacccgggaggcggaggttgcagtgagccgagatcacgccactgcactctagcctgggcgacagagcaagactccatctcaaaaaaaaaaaaaaaatagcacagctgtctattttatattctaagaatgaaaaatcaatccttcagaaatacagtcaaatacttcaaatacctgtatcccacctggcaaaagtcaattcctaaatatgcctaactctgaaattcacatgactctgaggtgaaaagttgatcaagtcataggagccagaaatcctcctgaaggaattgcttgggcagtttggaatattcctgtccaataagtcatttcttaaaaaatttacaaaacatccataaaatggaatactaaggtaatcactaaatgctaaattttagaaaacagttaaggaaaggaaaatattcaagatacactgaaagaaaaaaaaagtttacaaaacaatatatgattagattttttagaccattaaagggaaacagacttgaacagatgaaaaaaactcttaaaatttcaattctgagattttaaaattaattttaaaatcagatttaaatctcaacttaactgaaatttccataatttgaagaactgtaaatatttggaaggtctgtcaaaccagaagtggatcactgggatgtcacttttctccatacatccatggagtcatataatccacaagagcactgaattcctcttttaaactaagaactagaggtcttagtttcttttaaatttgcaattagtattagcctgttcttcagagagaaaaccaccagccgggtacggtggctcacacctgtaatcccagcactttgggaggctgaggcaggtggattgtctgaggtcaggagttcgagaccagcttggtcaacatagtgaaaccctgtccctactaaaaatacaaaaaattagctgggcgtgatggcaggtgcccgtaatcccagctacttgggagactgaggcaggagaatcacttgaacccgggaggcggaggttgcagtgggccaagatcgcgccactgcactccagcctgggaaacaagagcgaaactccacctcaaaaaaataaataaataaataaaaccacacacaaaaccacacagacttgtagaaatattttgggaaaatatgctctaaaacattaataattattatttctggacattgggaccattgatcattttaattttctttataggttccgtagttactaatatttcacaagcttgtattaattctgtcatcagaaatattttaaaaagctattccaaaaaattttaaatgactgggaagataggctaccttacagtcattaagaaaattgtgggccaggtgcggtggctcacgcctgtaatcccaacactttgggaggccgaggcaggtggatcacttgaggttaggagttcaagaccagcctgaccaacatggtgaaaccccgtctctactaaatacaaaaaattagcctggcatggtggcgggcacctgtaatcccagctacttgggaggctgaggcaggagaatcgcttgaacccgggaggcagcggttgcagtgaactgagatttcggcattgcactccaacccgggcaacaaaatcgaaaactccgtctcaaaaaaaaaaaaaaaaagaaagaaaaaagaaaattgtgattaaacaggccctgcataaatggtgacaacagggaaatcagtgtgactgaaaaaataatttctaccagttcctgagtattgtatctcatcaagaccctgaaatagttctgtgaaggattacaatcctggttcatgtcatttccaaagtgattaagagccagtaagaactgcagacaaaaacaaatgctcatttcacagcagctacttaataacttgcatttacccctcctcagctccaataaataactaatcattaaatacctagcaatttaatatttaaatattacattgttgcaaaataacttaaaaacctttattgtagtatacaagattcatatgtaacaatttcttgatgattcttatttacaacaatacttctcaatattacattatacttttttcttatgactaaatataaacaaaattcttattattgcataacattccatcacatggagtgtgatttaaccatttccatactgctagatattaattttataaaagaacatcccgaaagtcattaccagttatttcatttctagacagtgagaatcaatgttgttggagcttatacaactctgataataccatgaaatgatagacttcctcgctccactgaaaaaattaaccatttacaaatacatacaacaattctgtatataatcttaaaatatctttgttgccctgaaagctcataaacagagtccaaggacttatgttaccaatccctgttctggtccactgcagggtctggctcattttcctgcttgcaagcatccatcataattaccttcacatttgcattggtcttggaaatacacaaagctgataggaaatgactgagcatcatcattttaataccagtagctagtatgaattaaggactcactatgtgccaggcactctcctaagagcttcacaaatattaattcatgtaatcttcaaaacaacaccgtaaagtatacactattacaattctgaggaaattgaagcacagattgcttaaactcgttcagatttaagtggcagtcaggattcaattccacttaatctaggctcgaaattcttaaccactacactacacctccctcagtcgatccaagatatacccaaaataaactcatgctgccagacctcaaaccacatctggctggtaccaaaaacttccactcatgaatttcctggaaaaaaagaaatctccactcctaccccagaaccattaaacatatctaaaccctaaaaaacaaataaaaacaaagtatgaacattaatctccagcacgggtatttccatatcatcaagatccttagaaaaacagcgctcacagagtaattgaatttgcagcctacagttaactaaccatgtgtctaactatagaacagcatgaagtgggcactaacaacgggaaatctattaattaggtcccctgccgttaactaggtagggaaatcctaaggcccaaatcaatgaataaatagatcattcctaagcaggattttaaacggaaggaactcgaatgcatttcacagaaacaaagcagcagcacgaactcacagggaaccggcttttagaagagcagcagcgattcgtttctccttctcaagcgccttctctggaaactggcagggctggggaagcaggcagagttcaggacaccccaggcttttcttgactcgattggaacccaccctccacgcttccctggccccaactaaccgccacctgcatgcacaaatggaaacgacagggcagagggtcagcagtcacccgcgtctgggttcgcagctccgggtacgctgtagttccgcacccggttgcccacgcccgggaccacccactgtgtcttttcggaactgtccagcgtgtcctcctagaccccagacacccaccccaaatctaggtcccagcgttttgcaggggaccttcatcctggggcgttcacctctgacttccctcttgggccttttcgctacggccgagcctaagtggctgaagcgcggacgaggatgcgcggggcctcggtctccaactgcaccacaggccgcacccacgaacctggtccggcacagttactaccgcccgggcctccaggcctcagggctgcagaagctcagtcccgggaaaaaaagcacaccggcctgaggctccacaggaaccttttctccaccttggcccggcctgcaaaacctggcccactccgcgctcttttccctcagaaaagcagcggccacagtggcgcccggctcccagccccagcctcacccgactcagaggatagcccagccctgggagtcagcggcgccagaatacgggagagcgcctgtctccgtcgcgaatgcgctagcgcgcgggggggcggaggcaagtcccgcagctgctccgggccgggaggggcgcgtggggccgggtctcggcggggatagtcgggccggggagacggagccagaggggccgcagtgtccctcgcctcaggcctctacctgtaatggccgccccgtgactgaccagtgccattaaagataatccaggcctgctcccctgtggacactgcggtccaaaatttaaaaaaacaatattccgcctttttatttttcatttggttctcggctcggagacaggcggaggctgcgagccccgccccgcccccagcgacgcctcaccggaacctttggaaatcggcttctgcctcgagtgcgcaagcgcgcggggggcgaacgctggggcccttcagggagcaagggagaagtgtggggccgcacctgccgaggggtcgggaggtttggaggagggtggaggttggctacaggatcccgatggggatggagtgttcaaatctaggcctgtagccgtgaccctggcgtgagttggatggaggaaaccccagtatcgcgagcctggaccaaggcgcggcgcgtgctgcctgtggtgtttgctgagtgacggccgccgcgcccccgcgtacctggaccgagtgcctggccgctggcggagtagtgtttccgtgcacggggctgctgcgtgcgcgtgtgccgttctctagcgggggattaggatggtgccgcagagaaggctgcgcggtggtgcctgactctgacgctggctgtagcgggtctctggggtctttgcggtttgtgtctgcgtttgtgacgtacctgacatcggatctgtgactgtggctctgcctcatccagcgttatttccagaatccttctgatagggcagcgcttctggttctggttttccatggagacggtttgtgggtccctatgaaactgagtgttgggattttgattatctgcatctggcccttgtgtgccctcaggactgtggtgttaggcaagtaaaataattgcaggaaaaaaaattggaaaggaataaggttgctattacttccaaatgatggaattgtaggactgtgtcagaaaattgaataggacaccatgaaacgggagggagaggcattttattttcttccatacctggtcttggaatattctaacaaatgagatttgttttttcccctttgttcctggatgaactcttggataaattcaatgtctccaagcattcttggatagtaagtttctttgatctttagttgaaagatcagcctcattttcgtagctaaaaatacctttagtaataaaaatgttcattgtaatacttcatttaaaatatttaaaactttcttctttctccttgatctcttccagatatctcaagttttggttaagtgaatatgtggagtatatgtactaattacgtcaattattttctctttaaaaccaagtacatttcttacatgagtttgtttatcaaggatttattggttttctttgtacttgttgctattttttagaaatgttccaacagatatgttaaatgttcatcgattattttttcagtggttcaaacatcggagtagaatctctcttccattctgtggctgcaattggactgtacagttgtcctaaaatttaccgtcattgttttcctaagtttgattcttgtttcctagaattcagctaatttttgctaaagttcttttccaataagttccttaagatgcatgtattaaagatgttttttagttctttcatgtttgaaattttttttttttttgagacggagtctcactctgttgtccaggctggagtgcagtggtgcaatcttagctcactacaacctctgcctccccagttcaagcgattcttctgcctcagcctcccgagtagctgggattaaagacgtgcaccaccacgcctggccatttttttttttttttttttttttttatagtttaagtagagatggggtttcaccatgttggccaggctgatttcgaactccagacctcgggtgattcgcccacttaggcctcccaaagtgctgggattacaggcgtgagctaccgcgctgggcctgaaaatgtctttattctgccttcacactttgcctagattcagaatttggaggcgtcacttcacagtgttctagtagctaatgttgtcaagtctaataccaattgttttctgttcctttttaatttcatgtcccactcccaccaacgcccagatacctattgccacctgtaatccacaatgcacttacatttcataatttatgcacttggcatgtatgtttaaacatttttttctgctagttatagggcagcactttataggtctgaacatttttcttcctctttttcttttttgacagtcctctatccttctgaatttttgttctcttgtcctggaatttgtatttcatggaaggacttttcatgagctgtatgttttgtctcctattttttctctttttctcttactttgggaaattttgttgactttacagtacaattgtatttatttttaatttgataatcatttctaatttccaagagctcctttatattctgtaatttttatttcttcatagcctttcgtttttattatggatgcaataaaacctctaatctctcagagggcaattagtttaaagttttctggtgcttttttttttaatctatttttgtcttttatatccaaatcaaattccccctttacaaaaaagtttgaattgttctctttttatactggatacttccctgaaatgtgtggtaatccttgcctctagtcatggagtgaatcttctcaacctgacttcagagccagccgtttcattgggagatgtgagctgttctttagttcctcctttgaggacagtgagttagtgatgtctgagacctcaaagacctctcagaggcccccagttttgagtgtagtttttcatttagtttgcctatgactcagttctgtctttctttatgcaggtatacatcctctctgggtcattttatccacagatcacccccctaccccaatttagtgtatttgatcacataagagaggaaaagtaaaaaaggtgaacagccagtttgtgttcaaactttcaaccaatctcctgtttccagatccacatctctccagggtcatgctctttggtgcctgagcttccaggggtttatgcattgaattgcctcattaatagaaatctgactcctaagccctttcataccagaattcttggacagttctcctgtttttgtgtgtgcgtttttttttgttgttgttgttgttttgtttttgcagtctccctcctcattttctttggttcttacatgttaatactttttatattcctttacttaatatattcattttaatattttttttttgcagaggagaaatgggaaatcaatgcatctacttactctgtttatggagaagcctttcattactcttttaagtaagattttgcttgtaccggactttttttttttacaccagcttatttcttttagttactgcttttgttttctgtttcattaatttccacttttatctttatcagtttcttctgatgacttctcagggtgtattttctacctttttatttacagttttctattcctttcaaattcatcaggttgtattctgaaaaaaacccttggtcttaacttccaacttgctgagagatgttctctagctgtttcagtattttcactccttttttagcccaattattattttttaaaattaattctgaaaaattacagatacacaagagaatgtataaatgtgtttacagttgaatgaatgaaaataatgaaactaattcttgtaccataacttcataaaatatgaaggtctcttaatatgtttttggctaatatttacataggaaaaaatttacactcctaaaactcaatgtgacatattttttattttgaaataattttgaattttcattctcctatagccttcccccagattcaccagttgttcatggttttccacatgtgccttatcatactctgtccatatttatattttttagtggaccacatgagagtaaattccaatcataccctttacatctaattactgaagtgagtctgtcctaagctcaaagacatttagttactttaccattaagtattaaaatcaggaaatttaatattacaaaaatctaatgaatgccctttattaatatattttgccagttgtacctgcagtattcttgaatagcacttttttatttgtctagaattcattgtattatcactgattgaatttggctgataagtatatttagtctttcatctagagcagttcctcagtcttttttgtcatttatgacattgatatttttggaaaatactggccatttgtttgtaaaatatccttcaatttgagtttttctaatgtttcctaattagattcagactatgtatgctttggcacccatatactgtactacactataccatactgtactatatacacagtgcttttccattttatttttgagatggagttttgctctgtcacccaggctggagtgcagcagtgcaatctcggctaactgcaacctccgcctcccgggttcaagcgattctcctgtctcagcttccccaagtagctgggactaaagccgcacgctaccatgcccagctaatttttgtatttttagtagacacggggtttcaccatgttggccaggctggtctcaaactcttgacctcaggtgatcctgaggccatcctggccaacatggtgaaaccccatctctactaaaaatacaaaaattagctgggcttggtggcacacgcctataatcccagctgctcgggaagctgaggcacaagaatcacttgagcccaggaggtggaggttgcagtgagccgagattgtgccattgcactccagcctgggtgtcagagggaaactctgtctaaaaaaaaaaaaaaagtcaaaggagatgctgtcattaacatgtggacagcaggcattggccagactgtcccaggcaaagcaggacatcaggtcatcctaggcttgcaggaccatcacgtcttccctcttccccctgactcaccctaaacactataacaaccagaaacatttccacaaacaaccactcttcctatttggaactattcagaggccttacctgtcatgtggagataatattagtgcctattgcttgggtaaatcatggggctgttgtgaggttaagttacttaatatatgtcaggcattgggaacagtgtgcaaagacacacacactgtacattcaaggatactcactgcaatagcagaagtctgaaagcatcctacaattatcaatgggtcactggttataaaaattggatacctttgtgcattggattataattatctaggataactgtatgtttgtatttgttgaggacagtcctggtttatgtccttgtcctggagtaaatgatatcacccactttcactctcaaaagcatactgctttgaatgttacataatctggttactctttaggtctatacatgtagatataaaattgtctctaagaggctgggcgccacacttgtaattccagcactttggaaggctgagacaggcagatgacttgaggtcaggagttcgagaccagcctggccaacatggcgaaaccccatctctactgaaaacacaaaaattagccagatgtggtggtacacgcctgtaatcccagctactcaggaggccgaggcaggagaattgcttgaacctgggaggcggaggttgcagtgagctgagatcatgccactgcactccagcctgggtgatagagtgagaccctctctctctctctcaaaaaaaaaaaaaaaagtctctaagatgctgggagtggtggctcatgcctgtaatcctagcactttgggaggcctaggcagggggattgcttgagctcaggagttggagaccagcctgggtaacataatgagatcccatctctacaaaaaattttaaaaattagctaggcatggtggcatgcacctgtagtcccagctactcaggaggctgaagtgggagaatggcttgagcctaggaaattgaggctgcagtgagctgtggtcatgccactgcactctagcctgggtaatagagtgagaccctgtctcagaaatagaaaaataaaaataaaatagtctctaagaaagtttaatatgggaattgaataacaattgtttaagtaaaaaaaaactagaaatgtgcaaaaaataggaagtacacttagatgcatacatgtgcttgtgtacggatgggatatctggaatgagatgcaagaaaatgattaagtggatttctgggactgggatagaactgaaggactggtcagaacaggagagaaacttacctttaatgggacatgctttttaacagtttgatttgcttttgaaaagaactatgaacatgtgttaccttttcaccaactataaaattattattattattattattactaagtatatggagagggctcttgacaggaatctgatgtactgtcctgttccatgaattttccatcccagaagccccatggtcagctgggcattgccaatcaatgggatgccgcctggtccagggtcactctgacgcatcagacatctgctttgcttcaattactacagggttgcctttgaagacagaatttccatgcaaggtacaagaagcaggaccaatgataagccttctcttggagtaggagagtggggcaggtagatctcagagtgagctcataaacagagtcctggtgtgtgagtgctggtttcttctacagtgatccgtcccaggactgctgtgacccctgtggggaaggagcccgcatagctggtgttgctgtctggagtagaatcctgtgccccactcttctcatgtttggatatatctactaaacctcttgttttaatagcaagacattgagctgctgacaacccataaaaggtacagccttggctgggcacagtggctcacggctgtaatcccagcactttgggaggccaaggcaggtgggtcacctgaggttaggagtttgagaccagcctggccattatggtgaaaccccatctctactaaaaatacacaaattagccaggcatagtggcaggcgcctgtaattccagctactcaggaggctgaggcaggagaatcgtttgaacccgggtggcagaggttgcagtgagccaagatcatgtcactgcactccagcctgggtgtcagagtaagcctccatctcaaaaaaaaaaaaaaaaaaaagggtacagctttaccctgcaggatgtcagtatgtgagtaaattctttgacttgatttctcaagtggctacacagtagggcagaaattgcccggcctgtttcacggaactgaggcccagacattttcagggcagaattgcaggtagaagaatggcagagcttgttggctgggacttccctaggagaggtgttgcctgtgctggggacttggtggtgtggaagcagttggggatttcactatgagattgaagtgaagtcattattgagtcatgaatggagtgtaagtgtggcttgtacctgtacatgccagccctggcaagagtctccggtccagttgcaggggtgccataagcagcgaacagcctttggccatgaggtcctgttttttcccctttcccaggttgttggtgatggggttaactggacccaagatgatgagagagaagggaagcaggtccgagccacactcggagctttgacatctggagctcaaaagatgtgggacagtgtgtgcctctgtgtagggagggctccctgcaagccaaagctcttggtttacaattgggcgtatcaattaacttgacccagtcaaggtgaatctcagaggattattttggaatgccaggcaaaggtgctctccctcttgtactggaggggatatgtccagataggaggcctggaactgatgcagtcatgaggaaattagcctcaagccaaagccaaaacactggcaaagggagagctgagtgttcagtgttgaaacctgatgacatagtgaacatcttgatcatgccatacctgaagctccatttatctttggactttttggttacaaaagccaaaaaaaaaaaaagtcattaatttttttgctaaatgaactattttttacaatggttttagatttatgtaagacacaaagatatgacaatttcatacactcacaccaggtttcccctagtagtaacacttaccttaatatgatacatttgttacaattaaccaatactgtcagggaacagggcccatgcctgtaattccagtgctttgggaagctgaagcaggacaataacttgaggccaggagtttgagaccagcctgggcaacatagcaagacccttcactacaaaaaaatattttttaattagccaggcatggctggtgctgtggctcatgcctgtaatcccaggactttgggaggctgaggtgggtagatcgcctgaggccagaagttggagatgagcctggacaacatagcaagaccttgtctctactaaaaataaaaaaacaacagctgggcatggtgacatgcacctgtggtctcggctactcggaaggctgaggcaggaggattgcttgagcccaggaggtggaggttgcagtgagctgagattgtgctactgcactccagcctgggtgacacagcaagagtctgtctcttaaaaaaaaaaaaaaaaagccatggtggcatatacatgtacctgtaatcccaacactttgggaggctgaggtgggcagatcacaaagtcaggagtttgagaccagcctggccaatatagggaaatccgtctctactaaaaatacaaaaattagccaggcatggtggtgggtgcctgtagtcccagctactggggaggctgaggcaggaaaattgcttgaaccccggggaaggaggttgcagtgagccaagatcacgccactgcactccagcgtgggtgacagagcgagagtccatctcaaaaaaaaaatttttaagtatgacatagtgtttaccaagcaaatttggaaggaacaggtaatcaccattaaatgtttatcaattatttctataagattaaattacttttccaaaaatggacaatggtggcatcccaaaattctatgatacacttttatgtcttttgtgtctttttatgaagctagctataaaaattaccagtaatcaatgaaaattaggagacaagtaaggaaagaaaaatgaatatagaataggcaacttaaatgaaaattacataaaagcattgatagacataaaccttgtcagtaattccaaaagtgagtggactgttatagttgaaacttttttttaattagaaaatactaatctgggccgggtgcagtggctcacacctgtaatcccagcactttgggaggccgaggcaggcggatgatgagatcaggagtttgagaccagcctggccaacatcatgaaaccctatctctactaaaaatacaaaaattagcggttttgatcatttacagtttcaaagtatcttcccacaaaacacttagtaattaaaaaggggaatatgataattttagaatggacaaacctggtcaacaatactttaatcaagagatacaggttagcatcactaatgtgatgcactgttaataaaaaaggaaaggctggggcacggtggctcatgcctgtaattccagcactttgggaggccaaggcaggcagattacctgaggttaggagtttgagaccagcctggccactatggcgaaaccccatctctactaaaaatacaaaaattagccgggcgtggcggcgtgcacctgtagtcccagctactcgggaggctgagtcaggagaattgcttgaactgggaggcagaggttgcagtgagctgagatcacaccactgcactccagcctgggtgacagagcaaaactccctctcaaaaataaaataaaataaaatggaaaagcactgtgtatatagtacagtatggtatagtgtagtacagtatatgggtgccaaagcatacataatctgaatataataattaggaaacattagaaaagctcaaattgaaggatgttttataaaacaaatggccagtattttccaaaaatgtcaatgtcgtaaatgacaaaaagactgaggaactgctccactatgtcctgccaaaaaaaattttttaatagagttgaggtctcactatcttgcccaggctggttatcaagctcctgccctcaaacaatacaccagccatggcttcccaaagcactggaattacaggtgtgagctaccatgcctggcctaagtaatagcttttaaaggtaattatctttgattaatttttcaatgtttttgaagggataatttttttgaaagacctttctgaaggtctttccccatatctaacattcatagggtttctgattagtatgacttacttgatactgagttaactgaaagttatgaccaaagtctctgccacattccttatattctctgcatttctttccagtgaaatttctctgatgttccatatgatttgtgcaaaatataaaggtgctcccacacatttcattaagcttatcactggcatggattcttccttgtggagtaaagttttcacattttggcttcattcagactttctatagcttcaagtttggcttcattcagattttctatacctcagtgaaccaactagaaacatttacatattcctgtaaaatgaagtttaccatagatattttaaatttaattgaaatactaaacaaaataattcataatattaaaaatgcctgtaaaatttccatgttcccatttgcactgatgcatttatgttatttctcttactcatctcaatcataactggcaaatttagtctatattactggttatttcaaaccacttttagataaagtccactttctgtttagctcattttctttttaagtaattcattcaaattcactgaataaacagattgatttgtgaatacgtttccagcgtcaattttgggtttgttacttttctgcttgaatgtttattcagatgagccatatacctcaggttttattatgcaacactctcactatctttcatatctaaacagcttgttatttcagattacatttttcacttaatccaagaactatatatggtggtgtttataaactgcaaatttttaaaatttaccttttgtatctacttgtcttgtttttttttttgagataaaatctcactctgttgcccaggctggagtggagtggtgagatctcggctcactgctacctccatctcccaggctgaagcaattctcctgcctcagcctcccgagtagctgggactacaagtgcacaccaccatacccacctaatttttgtatttttagtagagatgaggttttgccgtgttggccaggctggtctcattgtttttttctttttttttttagacagagtcttgctctgttacccaggctggagtgcagtggcacaatctcagctcactgcaaactccgcctctcgggttcacaccattctcctgcctcagcctcccgagtagctgggactacaggcacccgccaccacgcttggctaattttttgtatttttagtagagatggggtttcactgtgttagccaggatggtcttgatctcctgacctcgtgatccgcccacctcagcctcccaaagtactgagattacaggcgtgagccaccaggcccagcctggccaggctggtctcgaactcctgacctaaagtgatccacctgcctcggcctcccaaagtgctaagatgagaggcatgagctaccacacccagcctgtcttgagttactgtcagaaaacgtacactgctttttgaaacttgcttcagatatatcacttctcatatcaactttactctaaaaaaatttacttactatatccattcagtgtttccagagtgaattttctgattcaactaaaataaatttaaatgaatgtttcctcatactcactatattctaataattttcattccagaataaattatcatagatttgcagtcagagaaattgtgatggtggatttcattatattagtaaaatctgcataattaaatgttcttatataaatattccaagagtagtaatgaaggtgataatcatgacagccaatatttactgaatagtttctatttgccaataactattcccaaagtctttggataaactcatttaatcttcacaataaccttatcacaatgtaagaaatttgtaatctgaagtatacagtttaaattacttggtaataaaacagacgtggaaactggtgaaagtataatgatgctgaaaaagattcgtgtaatagataaaagcttttctacattcacaaagtcaacatgattattctctatatgctattctctataagtcaaataaaattttagtggtaatgtttttattaataattgatattctattttttccatataaattctgatgcttaataaattgtgaattatgaggtaaaaaaatttacagtcactggattttcttcacttacaaattgtttgctattccataattgataatttcaaaatcaaggatttcctatattaatcacactatacattatataatgttgagtatattgtgagagtagatctttacacatatcgggctttcattaggcttctcacctgtacaaattctgttatgaaaaagtatagctgagggacaggtaaaagtgtttcccacatttcttatatttctgaagtttctctgcaatgtgaatttggtgatgttagataaggattgttaaataaaaagacgctattcaaatacataagatttgtcccttcatgtatgtattctctggtgctttttcacctatgaaagacaagaagaggccttctcacattcattacattcatagggtttctcaccagtaggaattctttgatgttgagtaagatgcgccctctgcctaaaggccttcctacattcctgacattcaaagggtttctcaccagtgtgaattctctggtgttaagagttgaacaatcaataaaggattttctacattttttacactgatacggtttctcactagtgtgaattctctgatttctattaaggtaggaaacaagcaaaggccttcccacattccttaaactcatagggtttctcaccagtatgaatattttgatgttgactaagatgggctctctgcttaaaggccttgctgcattcctgacattcataggtttctcattagtatgagttctatagtgttgaataaatgttgaataacaaagaaaagcttttttacaatctttacattcatagggtttgtcaccagtgtgaattgtctgatgtttattcaagtttgaaagccaagtaaaggtctttacacattccttacattcatagggtttcacactggtatgaattctttgatgttgagtaagagttggataattattaaaaaccttcccacattctttacactgatagggtttctctcctttgtgaattctctgatgtctattaaaatcaaaaaaacaaatgaaggcattcccacattcattacattcatagggtttctccccactgtgaattctctgatgtctcattagatgtgcattatgcttgaaggccttcttgcattactgacattcataaggtttttcattagtatgtgttctctgatgttgaacaagtgttggacaggagacaaaaaccttcccacactgcttatattcataagccttctcaccagtgtgaattctctggtgttgaataagagctgaacaattgttaaaagctctaccacattctttacattcatagggtttttcaccagtgtgaattctctgatgtctattaaaatcagaaacacaagtgaaagccttcccacattacttacactcatatggtttctcaccagtatgaattctttgatgttgagtaagatgtgcactttgcctaaaagcctttttacattcctgacattcataagatttctcattagtatgagttctctggtgttgagtaagtgttgagcaattattgaatgctttgccacattccttacattcaaaggacttctcaccagtgtgaattctctgatgctgaataagagttgagcgattgttaaatgccttcccacattctgtacattcgtaaagtctctcatcagtgtgaattttccgatgtctattaaatcagaaacagaagcaaaggccttccaacattgcttacatttataaggtttctcaccagtatgaattctttgatgtcgaataagatgtgcactccgcctaaacgtctttctacattccagacattcatagggtttctcactagtgtgagttctcttatgttgaatcaatgttgaacaacagataaacactttcccacattctttgcattcatatggtttcccaccagtgtgaattcgattatgttgggtaaggtgggcacgctttctaaagggctttccacatatctgacattcatagggtttctgattagcatgacttatttgatattgagttagttgaaagttacaagcagtctctgccacattctttaaatacattgcatttctttgcattaaaatttgtctgatgtttcatatgatttgtgcaaaatacagaggtgttcccacacatttcgtcaagcttgtcactgatatgaattcttccctgttgagtaacattttctcatttttttttttgttcatagagtttctttccagtatgaattatttgatttagaagaaaatatgtaggctggatgaattcggatattttttcaaatggcacagttacatgcctgaaatattcctctgtagtttcctgttgtctctcaaagagtcctttgcatttccaatcatttcccaaaaaagattcctcaaggcaagaacttctgacactttctattattttccattttaatgattccttttcaaaagtgccattcttaagagttaactccttggtctcatatctagacagcatatcttaaagaaaataaacatcatgttttcctcttttatgagaaataaaactgcatagaagcagtcaaacagataatattgcccttaagcaagaaatggcttagataacttttaaatcttggcatttaatttgcagaaaaaaattgttggaatggctatattaatatcagatgaaacagacttcaagttactctatattatcaaagataattttctcataatgataaaagagttataataactcatcaggaagacttggcaatcagaaatgtgtaggtgcagaataacagagcctgaaaatatatgaagcaaaaattgacaaaagtaaagcaggaaatagataattctacaatcatagttggagattttgcaaccatctctcaataactgatagaacgactggaacatccccctcccccagaaaattagtaaagtaatagagcatataagtaacactgtccaccaccttcaactagttgatatacacaaaacacaatatcaaaaactgcagaatgtacattctcttcaaatacctatacattcaaaatagaccatatgctgggacattaaacaagtctcaatacactaaaaaggatcaatgtcacacagaatattttctttgatcacaatggaactcagtttgaaattattaaaatttctggaacctgtcccccaatacttgaaaactaaagaatacacatggaaattagaaaatacttagaaatgaacaatataaaagtatagcacaccaaaatatgttatatagctaaggtaacatttatagtgaaacctatagctttaaatgcttatattagaaaagaaaaatgtataaaataaacaacctaaggttttactgcaagacagtagataaagaagagcaaagcaggccaggcaaggtggctcatgtctgtaatcccagcactttgggaggccgaggcaggtggatcacgaggtcatgaatttgagaccagcctgaccaacatggtaaaaccccgtctctactaaaaatacaaaaattagccgggcgtggtggtggatgcctgtaatcccagctactcaggaggcagaggcaggagaatcgcttaaacccaggaggtggaggttgcagtgagccaagatcgtgccattgcactccagcctgggcaacaagagcaaaaactccatctccaaaaaaaaaaaaaaaaaaaagagcaaagtaaatctacaattagtagaagtaaagaaataacaaggataagagcagaaatcaatgaatgagaaaagtgaccataacagagataattaatagtcaaaaactggtttatggaatagattagcaaacttgataaaccttggagccaaactaccaataaaaaacaagaagaaaaacacaaataccaggaacaaaaaggggtttctaattataaaccctacataaataataaaagtaaaaattaaacataattacataagaaaatatgaaccatttaatatccagaagtataagaagttagagaaaatggacacattctttgaaagacacaaactaccaaggatcagtcaagaagaaataagtaaaacaagccaggtgcagtggctcacatctgtcatcccagcactttgggaggccaagacagatggatcgcttgagcccaggactttgacttgacaccaggctagccaacatggcaaaaccccatctctacaaaaaatagaaaaattagcccggcatggtggtgtatgcctgtagtcccagctacatgggaggctgagcccagaaagttgaggctgcagtgagatgtaatcatgccactgcactccagcctgagtgacagagcaagaccctgggagtgagggagggatggataggggggagggatggagggagggaggaagggagggaaggagggaagggaggaagggagggaggaaggaaggaaagaaggaaggaaggaaggaaatagctgtctatttatcactgaagctgaatttatagtaaaaacattgccccaaggacaaacatggcccaatgactttaatggcaaatcctatcaaatagtcaaagaagaaataactcacagctaattacagaagcccaccactaccctgcaactgaaaccaaaaaaccattcaaaaactacaaattttcctcctgaatgatcatgcaaaaatccttttaaaataatagcaaatagaatccaataatatatatattaaatccataacacaacattcaatggcatttacctcatgaacaagtcagcttagcatttgaatatcaattaatgtaattcaacatattaacatattttaaaagtcaaatgacatgatcacttgaataaaaacaaaatactcttaaaaaattcaacacagaatcatcataaaaattcttgccaaactaaaaacagaaggaacttactttctcaagtaaaggacatcattcaaaaatctacaagaaatatcgtagtcagtaaaaaaaatattgactgggcgcggtggctcatgtttataatcccagcactttaggaggctgaggtgggcagatcactcgaggtcaggaattcgagaccagcctgaccaacatggtgaaaccccatctcgactaaaaatacaaaaattagctgggcatggtggcacacgcctgtagtcccagctactcgggaggctgaggcaggagaatcacttaaacccaggaggtggaggttgcagtgagccaagatcataccactgcactccagcctgcacaagagggtgagactctgtctcatcatcataataataaagaagtcttttttccttagatcagaagcaatgggagtgattaataggtttttttatcttaattatggtgatggtttcatgagcaaacatgtacacatataaagtataccatttcacacatcaaaatttgtcaaaccatgtactttataacatagctggttcattatatgtcaattatgcctcaatacatctgctataaaaaaaagttctttgtaaatatttgaaatacttcccatttgtcaaactttttctcccaagaccttgggcctctgagggaaggtttccacacaatatctcaaacaaaagacatcaccactctgaccagtttgggcttccctaaaatgcacttctgctgggagtaccccaacacccttacccacctggataccaccctgttttcccagccatccagggttctttcccttgttccaatagggaaatcactgatggcttagaaatggcaagtcctgctcaaagaaataggatactaaaaataaataagccaaaaaatgttcttatttagaattggtttaacctaaagctaattcaggttcctctgaagactgatggaaacagaaaatcataatttggcaaacaccagaggaaataactactgtcagagccaagtgtagtggcacacgccagtggtcccagctacttgggagtctgaggcgggaagactgcttgaatccaggaggtcaaggctataatgagccaagatcatgccactgcactccagcctgagtcacagagcaagaccctgtctcaaaaacataataaccataactgttctctgcaggaatcactgatgaaactaaagtgataaaaatgtcatgagcaagagggtatttgtagagcctcaaatttctttacaagttacttactgattgcaaaggtaaaaatagtggctttactatgcggaaccctagaggataccatttcaagcatcaaaacaagatactgtttttgattggccattatttatgtcctgatacaatgcactgaaaaaggcatcacttctgtagtattcttcccaaaaatacataactttaaagtaatcataaaaatatgggtcaaggccgggcgcggtggctcacgcctgtaatcccagcactttgggaggctgaggcaggtggatcacgaggtcaggagatcgagaccatcctggctaacacggtgaaaccccatctctactaaaaatacaaaaaaattagccgggcatggtggcgggcgcctgtggtcccagctgcttgggaggctgaggctggagaatggcatgaacccgggaggcggagcttgcagtgagctgagatcgcgccactgcactccagcctcggcgacagagcaagactccgtctcaaaaaaaaaaaaaaaaaaaaaaggacaaatctaaatccaggaataatctatgtaataacaggccagcacagtttaaaagtgttaattagggtcataaaagagaaaaaacatttccaagattgaagagggctacagatacaagacaactaaatgcaatgtgggatcctggatcagtacaagtgggatcctggatcagtaccaggataattaatgacatttgaaaaaaggaaatagataacttaatattatatcaattttactttttggtttagatatttgtactatgcttatgtaaattattagcattagggaaaactgactgaagagtagatggacatttggcatactggttagttctagctctcgaaatcatttcaaaataaaaagttttggccaggcatggtggctcatgcctgtaatcccaacactttaggagggcgaggcaggctgatcatgaggtcaggagatcgagaccatcctggctaatacagtgaaacctcgtctctactaaaaatacaaaaaattagctgggcgtggtggcacatgcctgtagtcccagctacctgggaggctgaggcaggagaatcgcttgaactcgggaggcagagattgcagtgagccgagattgcaccactgcactccagcctgggcaacagagcgagactccgtctcaaaaaaaaaaaaaaaagtttggctgggcatattggctctcgcctgtaatcccagcactttaggaggccaaggcaggaggatcacttgaggccaggagtttaagataagcctaggcaacatagcaagaccgtatctctacacaaatttaaaaaattagctgggcacggtggcacacttgtagtcccagctacttgggaggcagaggtgagggaatcacttgagcccaggagtttgaggctgcagtgagccacaatcataccactgtactgtagcctgggtaacagagtgagaccttgactcaaaataataataataataataataataataataataataataaataaaatttaaaaatgggccccagagaagcttttggataaaagaatgatgaagacgtcagaatacattcacattaagctgacctaaggaacacaaggaacaaagagacaaatgaggcagaaaggtcttagttaaatttaaatctacgtgggctctatctctacttatttgggtaagaaaaagcaagaagcctcaagacagaatcaatgtgtcttcctgtgaaatgtcaaattcctagaatgtagctctcaaacataaacataacagggtatgtgttttcctaaattgtagatgaaccatcacgtcttaaatcctacaggttattatataaatgtccctcgaccatcatctagctccttaaaaatcaagaaaaaactcagttacataaggagcccagggaaagagtgaaggtcagtgaagaacaagaaatatgaaggtgcttgagagtagcaatctattccaagaaaacaaaactcaaaccagttttttggaacatggaacagaaatttagatatttaatgcagccccagaattcccagtggagagaatattttctgaattacagggaacaggtgatcttacccggtgacacaaagttgctgtagttctccaacatgacatctctgtacaagtctctctgagcagggcccaggcattcccactctcccttagagaaatctatagccacatccctgaatgtcaccaatcctttaaaggaaaagtccatttaacatatgtaataataaagaaaatatattttaggtgaatgataaggacataaaaagggattttcctagaaggcattctatagtaagcagtaggttgaaattggaaacttatggaggcggcaataaggaaatgaatacacacatattgttgagcagtcctgtgctgtgaggtagatacaacatcctgccactgtgggaaatttctattaatcggaacatgttgagaagccaacagtgtaaaacaatgtaaattgaaactgggccaggcgcagtggctcttgcctgtaatcccaggaccatgttttatttctcctaatttgaaggaacttaaaaggctgaaatgcaaagatgacactgagaaacctgatcttgaatcgctaaggcaacagcctgacaaattaatcaggatgacgaaccaagctaggaccaaggctatatccatgtgtgtgagttaagaccagggatggaaaagaaacatttctaggactccttgacatggagcccagtgcagtgtgattccaaaatctgttggtgataccctaatagggactacagttagattgggaggatatggggatgcagtggttgattgttattaaggtgaaagtttaaatgaaaactagaaggtctgaatggaccttatgtgaagtggttacatctccttacctgaatacataatggggaagggtattatgtctgactgaggaacacttctcctacctagtattttaaaactaaaggcatgtaagtttgtccttcaatcaatgttattagacaggccaaacaggaacctatagaattgctgaagcccacataggttgttaattttttttttttttgagacggagtcttgctttgtcacccaggctggagtgcagtggcgcaatctcagctcactgcaacctccatctcccgggttcaagcagttcttgtgcctcagcctcccaagtagctgggattacagacgtgtgccaccacgcctggctaatttttgtatttttagtagagacagggtttcaccatgttggccaggctggtcttgaactcctgacctcaggtgatccacccgccttggcctctcaaagtgctgggattacaggcatgagccaccacacccagcctatgtaggttgttaatttgaagctgtatagaatacctggtagatacaagagattaccacttcattaataacatgttagaagctagagtgctggtaccaaccaattctctatacaataaccctgataggtctgtgccaaagggggagactaacagtagattgtcgaggcttgaatgaagtagtaccaccgaattaaaggacaccagtactctgactaatcttgcaaatgcttttttcattatcccaatcttgggaaagagacaaccatagtttgccttcatgaggggacaatcccaatttatatctactgtattctcacaggttatttgaattcactagcttactattacaatttgattaggaaagcgtggacttgagaccagtcctaagtgtaacaatatactacattgatgataatgataacatcagaacctgaagaacaaattaggtctgatttccagcagggaaggcccacgcggagaggtagcatagcatgtagactctatccgatggccactggtagccctgggagcctacaaaaggatcctggcagtggatagacacacttcccctgtggtagatgtaaaggctcaaaatactataaaactccttgaatagaaacgtgccaattggcattgctgtgttatatttattcagaccaaaagaaacactttacaccccgcagtgtccaacaatgtccaaagagttctcacatcaattggatataccatgatgcatatcatcctcaaagtagtggtttggtagacaattagaataggagagctatagagttgttggctaaagtaagggaaagtaaagtatgggctggcttgcattccttcatgaggatgtgcttactctcaagatggggaaagccaaagacagtctccactagagagattcctctactgtcgtgggcaattaggaggagagggtgcatggcagaatgctggcacagttacacaaatcttccccaaataacctcaactttcttttttcctacctgatgcagtggccctgggactatgactgtaactccaagtgacagaagcaggggtgatccctaaacaagaaactggaactttacctttcaatcttttttaaaatgttatttatttatttttagagatggggtcttgatagttgtccaggctggacttgacctcctgggctcaagtggatcctcccatctcagcctcccgagtagctgggactgcaggcacataccaccatacctggctaatgaagtaacagtgaaaaagactggcttcagggagaatttaaccaaccatcagctaatttctacgctcaatagttctgtacaagtttatcatgtggcacataacagtagattcaaggagggaaatgagtaatcaaattaatacaaaaatatgagaatgcatgtaatggctttattggataggttagttgtttctttaaatccattgctactccatactggctccttgaaatgatagccatctacatcctgatactattgctgtttctgtgtagctgctcaggtagttttgctacaagagagcctaagccaaggcctgggtgagtggacaggtaactcagtacacctggaatgctcaaatcctgcacgtgccaaagaaagaactggcccttgactggctcttgggagataacctctgagcccttaaaatatcctacctgataagattgtttttgtatgccacaggccttggagcatgctgtatcagtttgacatctggggaactggagactgagtagctaaagtcaggtattgagtgataaatccctgcaagactgactccccaataaaaactctggaaaccaaggctcaagtgagcttccctggctggcaatagttcacacaatgttgtgacatgtcattgttaggagcattaagtgtgtccctgtatagctcctctggaagcagccacctgaaagcttgtacctggtttctcctaacctttgtccatgtaccttttctttctggtgactttagtatgtatccttttactagaataaaccataactgtaagaataacagcttttctgcatcttagcaaatctttgaggctgatagtctctaaagttcttagtacagtttctcttttcacaaaataaaatggaacatttgagggaatcttcccaaaatatcttattaaaacctctatcgtgtaatgaatatgttaattagcttgatagtggcaatgacttcacaatgtacatttctatcaaaagattaaatatataaatatatatttaaatatataaaatttttatgtgtcaattatacctcagtaaagatgggcagggagtacctccatctcagcggtccccaacatttttggcatcagggactggtttcatgaagacaatttttccacagagtagggacagggtggtttcaggatgattcaagtgcattacatttattgtacactttatttgtattattattacattgtaatatataatggaataattatacaactcagcataatgtagaatcagtgggagccctgagcttgttttctgcaactagacagtcccatctgggggtgatgagagacagtgacagatcatcaggcattagattctcataaggagcccacaacctagatccctcacatgcacagctcacaatagggttcacgctcctatgagaatcaaatgccgccgctgatctgacaggaggtggagctcaggcagtaatgtgagtgataaggagcggttgtaaatacagagaaagctttgctcacttgcttgccactcacctcctgctgtgtggcctggttcctcacaggccaaggaccagtactggtctgtggcccaggttttggggacccccgctctatcttaataaagaggatacaaataaatttgaagacttccttgcagaagatgcaaataaatttgaagaattctaaaacaacaactactaaagaaatttcaatagagaggtaagatgctacttgaaatcaaggatttgaatggtagagtgtagggaccagccccacagggtcggtgggtctctccctgtgcacggcgacgagagagtgtagaaataaagacacacgataaagagataaaagaaaaggcagctgggcccgggggaccactaccaccaatgcgcggagaccggtagtggccccgaatgtctggctgtgctgttatttattggatacaaggcagaaggggcagggtaaagaatgtgagtcgcctccaatgataggtaaggtcacgtgggtcacgtgtccactggacagggggcccttccctgcctggcagccgaggcagagagggagaggagacagagagaaagacagcttacgccattatttctgcatatcagggactattagtattttcactaattgactactgctatctagaaggcagagccaggtgtacaggatggaacatgaaggcggactaggagcgtgaccactgaagcacagcatcacagggagacggtcaggcctctggataactgcgggcaagcctgactgatgtcaggccctccacaagaggtggaggagcacagtcttctctaaactcccccggggaaagggagcctccctttcccggtctgctaagtagcaggtattgttccttgacacttttcgctactgctagaccaccgtccgctcggcaacgggcgtcttcccagacactggcgttaccgctagaccaaggaacccttctgctggccctgtccgggcataacagaaggctcgcactcttctcttctggtcacacctcactatgtcccctcagcttctatctctgtatggcctggtttttcctaggttatgattgtagagcgaggattattataatattgggataaagagtaattactagaaactaatgattaatgatattcatatatctctaagatctatatctggtataactattcttgttttatattttattatactggaacagctcgtgtcctcgatctcttgcctcggcgcctgggtggcttgccgcccacagtagagcaacaaagaaatatcatttcccagttatgagattagcaaaatgagacaactggttacaccccatatgattacatgagaaataatctcagggcatcctgcacataagattatatttagaaaaatgtatgagcatgtacaggcatgccttaaactcagcaattatacatcttagattctattcaaatgaagatttaaatgtgtacaaagaggaaacagtttaacaaaccattattgtattaatataatgaaaaacaagataatcataaaactgatagctttgccaggcacggtggctcatgcctgcaatctcagcactttgggaggccgaggcaggcggatcaccaagtcaggaaatcgagaccatcctggccaacatggtgaaaccccgtctctactaaaaatacaaaaaaaattagctgggtgtggtggcgtgcacctgtagtcccagctactcaggaggctgaggcagaagaatcacttgaacccaggaggcggaggttgcagtgagccaagatcatgccactgcactccagcctgggcaacagagtgaggccccatctcaaaaaaaaaaaaaaaaaaaaaaagatagctttggggtggggcgcagtgactcacacctgtaattccagcactttgggaggccgaggtgggaggatcactcgaaaccaggaattcatgaccagcctgggcaatgtagagagaccccctgtctctaaaatatatatatataaactagccaggtgtggtagcccacacctatagtcctaactacttgggaggctgaagcaggagaatccttgagcccaggacattgaggctgcagtgagttatgattgcaccattgcactccagcctgggagacaaagggagaccccatctcaaatctcaaaaaaaaaaaaaaaagtttctccttaatttgtaacatgaaaaatcttttacctcaattttctagtgaacagagagcattattaaacggaatagtcattgtcatcctagagttatcaaacagaagagtgactgtcaaccacttttggcagaaaacccacacgtgtgtggatatatataagatctggaaagatttttcgttgttgtcgtactataggtaatctttactttgtgattttccacattttctgaatttttgcattgaggatatactatcttttaccatcataaaaaacaccactaagcccaggcaacatggtaaaaccccatctctacaaacaatacaaaaattagctgggcatgatggtgcgtgcctatagtcccagctacacaggaggctgtggcgggaggatggcttaagcccagcaggtcaaggctgcagtgagccataatcgcaccactgcattccagcctgggagacagagtgagaccccatttccaaaaaagaagagtcaacaagttttaaaaaatcaagaagttcataaagtaaaaaaagttacagtaagctaaagttaatttattattgaagaaaaaaattttcacatatttagtgtagcctaagtatacagtgtttctagtctatagtggggtatggtactgtcctagccttcacattcactcaccattcacttactgactcacctagagcaactttcagtcctgcaagctccattcatggtaaatgccctgtacaggtgtaccattgtttactttttatacctttttttttttttttttttgagatggagtcttgctcttgtcacccagtctggagtgcaatggtacaatcttggctcactgcaacctccgccacccaggttcaagcgattctcctgcctcagcctcccgagtagctgggattacaggcacctgccaccacacccagctaatttttgtatttttagtagagacggggtttcgccacgttggccaggctggtctcgaactcctgacctcatgatccacctgccttggcctcccaaagtgttgggattacaggcgtgagccactgcgcctggcctataccatatttttactgtaccttttctgtatttagatatatttagatacataaaatcattgtgttgcaactatctacagtattcagtacagtaaaattctatacaggctggtggcctaggagctgcaggctatactatatagcctgggtgtgtagtaggctatcccatctaggtgtatgtaagtccaccctctgatgttcacacaatgatgacatcacctaacaacaacattacctaacaacagaagaatgtatccctgttcttaggtgacgtctgactgtatatctaacattaaaagtttatttacaaaaataaactttatttacaaaaaaactttatttaaaaattacatggcataaggccgggtggagtggctcacgtctgtaatcccagcactttgggaggccaaggtgggcggatcacctgaggttaggagttcaagaccagcctggccaacatggtgaaaccctgtctctactaaaaatagaaaaaaaattagccaggcatggtgatgggtgcctgtaatcccagctattcgggcggttgaggctaggggaattgcttgaatccagccagtggacgttgcagtgagccgagattgcaccactgtactccagcctggacgacagagaaagacttagtctcaaaaaaaaaaaaaattacatggcataacgcttacgacacaaaatctctttatctccagagtttctatgtattcaagatggttttctcataaaacagcagaggttactgtggtcagaatgtcaccttcccatgagcccacaaggaaaagcatctgtgtttcgctagttcctgtcacactttaatctatttctgtatagattatatgtcccttgctagattgagagaaacttaactagggctttctaatcacttcatttctcccaagtattagcacagaatcattgatattcctggcattaataaatgcttaatattttacctaaaaattctatacttgggaagttatcaataaacgaaacctagaaaagtgcaaaatttagtgaacacaagaatatatcacagaacagttacatgacagatgactgcactaccattaacagctatgaccaaacattttaagtaaaaaggaaagatatacgtgacgaattactacgtaagggggcaggtctttaaaagaacctataatttggctgggagtggtggctcatgcctgtaatcccagcattttgggaggctgaggcgggtggatcacgagatcaggagatcgagactatcctggctaacacggtgaaaccccgtctctactaaaaataaaaaaaaattagccgggtgtggtggcgggcacctgtagtcccagccactccggaggctgaggcaggagaatggcgtgaacccaggaggcggaggttgcaatgagctgagatagcaccactgcactccagcctgggcaacagagcgagactccatctcaaaaaaaagaaaaaaaaaatagagattgagaccatcttggccaacatggtgaaaccctgtctctactacaaatacaaaaattagctgggtgtggtggcatgcgcctgtagccccagctactcgggaggctgaggcaggagaattgcttcagcctgggaggtggaggttgcagtgagatcgcgccattacactccagcctggtgacagagtgagactccgtctcaaaaaaaaaaaaaacaactataattttagaagagcatataacacaataatttaaaatgcagctcagaggccagatgcgttggctcatgcctataatcccagaactttgggaggccaaggggggcagatcgtttgagcccaagagttcgagaccagcctgggcaacatagtgaggccctgtctctacaaaaaaaatacaaaaattagccatgtgcagtggtgcacacctgtagtcttagctactcgggaggctgaggtagaagtatcacttgaacacaggaggtcgaggctgcagtgagctgtgattgtaccactgcattctagcctgggtaacagagcaagaccctgtctcaaaaaaataaataaaataaaataaaatgcagctatgcttatagatgcctgtgatgtgactcttgataagtggatttttagaaagtcaccaaatgaagaaacagagagcacaccggagaagagctcaagtgaagccagactgcctggtttgcactccagttctgctgtgcaccagcttgggcaagttacttcacatctttgtgttaaatattctagcacatgaatggagaagaatgtttctagttctttccatttgggaggcacagattgtttgtaaggtcatatctatggttaaaccaggcatctttttaggccacagatgtatacctttgaagtcagaataaattctacacctctttcaggaaaaaaattttcaagggatttgtggccaatatatgaagtaaatgacctgcagattaaaaactcctgttctatactacttgagtgtctagctctttttcttatttgcaaatatctatcacaattaattttatatttttgttttccctgatccatagataacttagtacaaaatataatcgtaacagttcatgtattaataaattgaatatactttatgtgccaatatacctaagggctttacatgtatcaatttagtcattctaacaaacctacaggtgagtgctatcattccctccattttacagatgaggaaactgagatgcagagaattacatttctctagaacacagatattaaggtccccacatggcctaggaggtgcttgagtaaaaaaagaaaagcataccgccttttatggtccaggtagatatatggcctaaaacaaatcatgctggcaaatctcaagccaaacttgatcattataacaaagtggaaagtgcatttccgagaaaaaacaaacaagtagttaacagaagaaagaaatctcccctcaccttgaacatggcttttacatccacaatagccatgcttccctgctcctcagggcacctctggaaaaacacagactggagaaggagaatggaattaggagaaaccagttttgtgtcaatataaactgaggcctgttctccaggtcctctgcctgtgtacacagatagaagtcagagagagaccagcatcttttacttatctttgtgtcaaaaagaaaagtcaggatggaagctacctggagctgccacttctcagcggtctcagatacctaactgagatagtccaggcatggtagggcttctaggaagtgtaattttctccacagagcttccagaaggattcatgacaagggaattccgatttctggtgactctcaggtgtctccccttcttttttttttttttttgagatggagtcttgctctgtcacccaggctggagtgcaatgcacaatctcggctcactgcaacctctgcctcctgggttcaagtgattcttctgcctcagcctccccagtagctgggattacaggcacctgccaccacacccggctgttttttgtattttggtagagatagggtttcaccatgttggctagcctggtcttgaactcctgacctcaggtgatccacccgcctcagcctcccaaagtgctggaattacaggcgtgagccactgctcccagcgttctccccgaatctcctccagctctaaaattctagcccaagaccagagctgtgggtcagggttaatcaatcactattagctgtttactttcaccctgtagatcaatgatctggagagtctcccctaccccacagcatcaccctacccaatattaatctatcccccaaccctaaccacaccccacacacccatatctcatcccatgccccccacccctacagagacagtaatctcagggtgccactgaccgtagagagcttccgacattaccctaagaggtttctctctggatttgtccacctcatagaaataaaaaggaggactggatctccctgctgatttctttttttttttttttttttttttttttgagagacggagtctcgctctcgcccaggctggagtgcagtggcgcgatcttggctcactgcaagccccgcctcctgggttcacgccattctcccgcctcagcctcccgagtagctgggactacaggcacccgctaccatgcccggctaatttttttgtatttttagtagagacggggtttcaccatgttagccaggatggtctcgatctcctgacctcgtgatccacccgcctcggcctcccaaagtgctgggattacaggcgtgaaccaccgcgcccggcctgatttcaggtcctacggcctctgtaaactataaactcatgcacatagcacataacaactctatccaaactcctatggtaagagacttgcccaaattctagaatagcttccagcattttaagaccatgttcctaggctgaccccagtcccccttaaaatgcctgcctgacaacagacgcttgaaggcagcatgctcgttaagagtcatcaccactccctaatcttaagtacccagggacacaaacactgcggaaggccgcagggtcctctgcctaggaaaaccagagacctttgttcacttgtttatctgctgaccttccctccactattgtcctatgaccctgccaaatccccctctgcgagaaacacccaagaatgatcaataaaaaaaaaaaaaaaaaaaatgcctgcctgacaaagtttaatgctgcctggagaatttactatttgttccagctaaaaacctagtggtaggcagacaggcccctaaactcccttttaaaagtaactgtttttggccaggcgcggtggctcacacctgtaatcccagcactttgggaggctgaggtgggtggatcacttaaagccaggagttaatgaccaggctggccaacatggtgaaacaccatctctactaaaaatacaaaaattagccaggggtggtggcgtgcacctgcagtcccagctactctggaggctgaggaaggagaatcgcttgaatccaggaggccaaggttgcagtgagccaagattgtgcctctgcactccagtctggttgacagggcgaggctctgtctaaaaaaaaaactaactgcttaaagagggagttcaggggcctgtctggctaccgctaggaaagcttatcattataaatgctttctctgccctttgagatgtatacctaccatgtgccactcagaactatttcctcaaggacctgagatgcaaacattcagggacataactcccagcccctctggaagagtaaaggcctaactttggtgggtgcagtgctccaagctgcaccacttggccttctgtaataaaagatttgagaactttgcttgatacttaattatgaaaaaataaaattaaaaattaaaaagatctgagaactggctggtgtggtagctcatgcctacaatcccaacactttagggaagccgaggtgggagaatcgtttgagctcagtagtttgagaccagcctgggcaatatagtgagatcgatcgcctctacaaaaattttttttttaattaccagtttagtcacacttacctgtagtcctagctactagggggctgacctgggagtatcgcttgagcccagggtgtcgaggctacaggaaaccacaatcgcaccatggcactccagcctagacaacacagtgagaccctgtcttaaaaaaagaaaaaaaaaaagaggccgggcgcggtggctcacgcctgtaatcccagcactttggaaggccaaggcaggcggatcacaaggtcaggagattgagaccacagctaaaccccgtctctactaaaaatacaaaaaattagctgggcacggtggcgggcacctgtagtcccagctactcaggaggctgaggcaggagaatggcgtgaacccgggaggcggagcttgcagtgagcggagattgtgccactgcactccagcctgggtgacagagcaagactctgtctcaaaaaaaaaaaaaaaagaaaaaagaaaagaaaaaactctgtttctttgtttcttctccagaaaaatggcaattagcaaactaggtacatggaccaaactcccctttgcacccttcagtggcttttccctagcacacccccgcctttaaaaagtctccctttggctgggcacagtggctcacgcctgtaatccccgcactttgggaggccaaggcgggcgaattacctgatgtcaggagtttgagatcagcccggccaacacggtgaatcccagtctctactaaaaatacaaaaattagccaggtgtagtgttgtacacctgtaagcccacctactcgggaggctgaggcaggagaatcgcttggacccaggaggcagaggttgcagtgagccgagatcatgccactgcactccagtccagttcagttcacttccccattgcagcagctattacaggttgagtttcccttaaccaaaaggcctggaatcagaagtggaatctgaagatttcagactttttcagattttgagatatttgcattatatagcagttaatcctccctaatccaaaactccaaaatctgaaatgctccaataaactttcctttgagcatcatgtcagtgcacatcaagttctggattttagagcattttggatttcagattttttacattaagaatgcttaatctgtactgaataaaatctcttctcagctgggtgcggtggctcacccctgtaatcccaacactgggacgctgaggcgggtggatcacctgaggtcaggagttcgagaccagcctggtcaatatggcaaaaccccatctctactaaaagtacaaaaattacgtgggcgtggtggcgagcgcctataatctcagcttctcagaagactgtggcaggagaatctattaaacctgggaggtggaggctgtagtgagctgagatcgtgccactgtactccagcttgggcaacagagcgagactctgtctcaaataaaataaaataaaataaaataaaatttcactgctttagtgtctgtttatctttgaatcatataaacagaatcatatactatgtagtattttgcatctagcttctttcacttagaatttttaaggttcatccatgttgtaacatgcacaattgctaagtaatattctttattaatatttttaatgtttttagagacagggtctcactctgtcacccaagttggagtgcagtgagctgggactacatatgcatgccactgcacatggctaaaaattttttttttttaattattttctatagagacaggctctcaccatgttgcccaggctggtctcaaactcctgggctcaagcgatcctcccacctcggcctcccaaagtgctaggattacatgcgtgagccaccgcatccgtccaaatattttctttcattacatcttttagttggctttaaaaaatatataaataaagactacaaatttccagatcctaattttgtactcaatttctttataattttatcattgggccaggtgagatggctcatgcctgtaatcccagcactttgggaagctgaggcagacggatcacgaggtcaggagttcgagaccagcctggccagtatggtgaaaccccgtctctactaaaaatacaaaaaattagccgggtgtggtggcacgcacctgtagtcccagctattcaggaggctgaggcagaagaatcgcttgaacccacgaggctgcagtgaaccgacctcatgccactgcactccagcctgggcaacagagggagactccgcctcaaaaaaaattaataataaatttatcatttaaatttacgtgcagtcaatgttttgaaatacttggaggatctttgagagaagcataggcttctttacatcccaaagacattgtggcctggggaaactggaacaaattagccgaatgaatctggtactaggctcactgaggaatggtgaagccttaaaaggctccaggacttctctgaacgaaggtttgcttttcagaaagtggagttatagcgccttacctggaatcttgaaccccaaattatgatctctccacggtagtcaacggagcttcataaattattccttaatccgaggcttctcaaatctgttgtgttccctaaacaacagaataaatgcctactctgagggtctgacacaaaagcaggagtcccacaaaataagttcctttaaaatatttcttcttgtatttaaaagtcacactgatttggtattctatacaataataaatttatcttttacacagaaatcctgttttatagtatttatcagatcaattatttagccttttccaaattttcgagtaaactgacgtcctggaagaagcacccttattttcaccattttacagtcgaagaagggaagataagaggcggtgaatccgagactttcattcaggtgacgatccctcgcgggcactcactctcgctcacactacaatcagatcctccatgcggctttcatatactctgtcacactcgcagccagaatcccctcggatggactcttgcaaacctccagccccatcccgggatccgtgcgtcttctacagccaccacttgggccagcgtccaggacgcccaagcgtaacctccccactctaaaccgttaggaatcagtggctggactcaccgcgtcataaaagcataaactgtgacccgatgagtccgcgcactcggaaaacaagagaacgctcccacgtctccgggcgcagcttgtgccagcgactactaggtcagggggcgcagctgagagaattcaagcaacctccccgcaaccggttccgccgcgtttgtgggctggtagcccggaatacatttcccagaggccttcgcggccgacgtgcttcgcgcaggaacgcagccgcctcccgactggaggacgcggtagcggagctgctcaaagcgaggtgctcagccctgggaggctcagggctgcccgaggggcttagtcccagagccagtgctgtcaggggctgagcatgtgaatagggcagtcggaagaccatgtgtgtctgtggcttttaaatacaccccgaacgtctatctcttttaactggagtatttaatttatttacatttaatatagccactgatagatttaaagctgccattttattatattttcttttttttttttagtgctaaatacacaggcttttattttcttcatattcaatctttttgtgaatttaaagatgaggaggccgggggcaatggctcacgcctgtaatcctagcactttgggaggccgaggcaggcggattgcccgagctcaggagttcgagaccagcctgggcaacatggtgaaaccccgtctttactaaaatacaaaaaattagctgggcatggcggcgtgcgcctgtagtcccagctactcgggaggctgaggcaggagaatcgcttgaacccgggaggcggaggttgtggtgagccgagatcgcaccactgcactcgccggggcgacagagtgagactctgtctcaaaaccacaacaacaacaacaacaacaaaaactatattaatactttaataccctaaagataatgagacaaacgtgcatttgtggaactgcatgtcaatcaggccagttccctgcagagggaactcccagcatgacctcagtcatctgtgaggacacagagcagtccttgtttagacacacactttcatctactgctgcagcatggtcagcactccacttcttgatggtttccttctgctatgaatatgcatgtccagttgcttcttagagcagacaccttcctcatccaccagccattggaggaggactggggccacccagatgattgattggacccattcttccaggagggtttcccggtggccctcttccatcgtcatcgtatctgaaatcagatgagtttccatagcttcttctttttttcaaatcttgccgaagcagagttttgaaaaacaaaaccacaaactcagctattccccagaagaaatctgttatcaaagataatctccatggagactgactccagttgtccaacacttgtgcgtttgagatgtaaaccatcttgcccccattccctgcttcggagccttatttattactttttaaaaacagggtctccctatgttgcccaggctggccttgaactcctgggttcaaacgatcctcccgcctctgcctcccaaagtgctgggattacaggcattagctcctggcattttaatttgttttctttttgttgcatgtttcctttttctctcctttctttatgttggattgatgtattactattccaattttctctttaatagtttgtaggttctttaagtcattactccaggaattttaataagtccaaatttatcaatactctgactctcctctcacagaatgcattcaatttcatatgccctcttaaatttaaaatacaagatatcagttacatattcgttttgtttaaaaaaacctctctaggctgggcgtggtggctcacgtctgtaatctcagtactttgggaggccgaggtgggccgatcacaaggtcaggagatcaagacaatcctggccaacatggtgaaactaaaatacaaaaattagctgggtgtggtggcgcgtgcctccacacccagctaataccagtagaataccagctacacaggaggctgaggcaggagaattgcttgaaccagggagtcagaggttgtggtgagctgagattgtgccactgcgttccagcctggtgacagagcgagactccgtctcaacaaacaaacaaaaatctctctgatgttatactattattttgtcagtattcatttacatttactcagaacattaacataaatataagtggtgttcaaataaacagaatgtttaggttttgtcaaagagaaatacagtggggctgggcgcagtggctcatgcctgtaatccagtgctttgggaggttaaggcagctggattgcttgaggccaaaagtttaagagcagcctgggcaaaatagtgagaccccatgcctacaaatttttttttttttaattagctgggcctggtggtctacacccataatcccagctactctggaggctgaggccagaggatcacttgagcccaagagctatggatggcatgactacactgcagcctaggccacagacctagaccctgtcttaagaaacaaaaaggccagatgcagtggctaacacctgtaatcccagcactttgggaggccaaggtgggcagatcgcctgaggtcagcagttcaagaccagactagccaacatggtgaaaccccgtgtctactaaaaatacaaaaattagccaggcgtggtggtgtgcacctgtaatcccagctactcaggaggctaaggcaggagaatggcttgaacctgggaggcggaggttgcaatgagccgagattgcaccattgcactccaccctgggtgacaagagcgagactccgtctcaaagaaaagaaaagagtccaagcgtggtggcgtacgcctgtaatcacagcactttgggaggccgaggtgggtggattgcctgaggttatgagttcaagcctggccaacatagtgaaagcccatctctactaaaaatataaaaattagcggggtgtggtggcacatgcctgtaatcccagctacttgggaggctgaggcaggagcatcacttgaacccaggaggcagaggttgcagtgagccgagatcatggccactgtactccagcctgggccacagagccagactgcatctcaaaaaaacaaaaacaaaaaaaaaaaaagaaaagaaaaagaaacaaagtgagacaatagtaaaaggcagtaaagacagattttattcagtaataactactgcattagggaacagaatccagtgtgaactgagctccactttgggaaacaaaaatcaggagttgttgaaaatgttggggtgtactaaagaagacactgaaaggtgttacgggggagtttggtccatatgactaaggcatcaggtttttttttttttttttttttaactaattggtatttatccagagtagaaacaaacttcttgtatctttacgactgaggtagttgtgaaagttggagcaagacagccaccaaagttaggcccttacactcccacagcaactgagaggctggagcaagagctggctctctgaatgtttgcatttcaaactcagctgaggagacagctcttggtggtagatttgcatctcaaaggggcagagaaatggtttataattgcaagctttctaaagtaactgctttaagagggggcttaaggacctatcactatttacaggttttggctggaacagtatgttttcagaacagcattgagctttctcaggcaggtttttttttttttgagatggagtcttgctctgtcacccaggctggagtgcagtggtgtgatctccgcgcaccgcaattgccacctcccgggttcaaacaattctcctgcctcagcctcccgagtagctgggattacaggcgcctgccaccacgcccagttaatttttgcatttttagtagagacggggtttcaccatgttggccagtctggtcttgaactcctgacctccagtgatccacccactttggcctcccaaagtgttgggattacaggcgtgagccacactgcccagcttacatctgaatttcattccaggattaagtgtctgattcacctaaacagatcggaatgaaagccctcttatggtttttacttattatctgtttacccagaatgaattcaaatttaaaaagcataaaacttttttgaattcattaaacttgaatggttaatggttttcatttcgtcaaaatgcactaaaaataacacaagtaatgatattattatatacagaagctaatgtttattgaacgtaacagtatatttcatgtagtttcccataattttttcatgtactaactcatgtaattctttgttttttagagatctgaagtgattttacctttacttccttcactttaagccaatcatgaaatttcagtgatttctggggtgagggcgaaaggtggtgttacgaatcatcggggctgtggcccagttgcctcacggaggtgcaggtaggctggggcctcactagggcagctggaggagcacggactgccctgccggcaggcaggtgatgttccgagagcatgagagctggtatgcaatgtcttctgcagcttccagcttgcacagctcgctctggccgtcccctgcagtggccagtgagttggcgatcagctcagctgccttggagtcaccctcagcagagatgatggccgccttttccaccacaaatctggcgctctctgcttcctggggggccacctgtctgttaactccttcaagaaggtcagatgtgtcaaagacacgtcgtccagaatgagcccaaaggtggctgctcactccataaggttgttgctcacctggctggagaccagctccctctgggtgattagttctccagcatcaaagcgagccaccagtgacttgaggatctccgtggtaatgaacggcagcacacactcatcgtagtcctctccaatgctggtgaagatgcgaggaagctggctagtgatgggccggaagaggatgcacagtgtgatgttgacattctgtaaatctttgctaccagtgatgactggcgcactacgtggttgagaacagcagtcaaagataattggtttttgtacacatgggatgagaaagtgagtcccttcccctaccacaatgttctgtactccacggaattggtcaaagatggcagctctgtgcccagcatccacattacataaggcagagttcaccatgcctcctgcaacagctaaggccaggccaaacttgccgatggactcaaacactttggcagccatgttttcttctgcgggaccctctcacacctgcttccactctgacctccacatctaactcatgtaattctaacagcactatactgtaggtactactatcatcatttatatatgatccccagaagggataaatatcttcccccatatcatcccagctataggaagcagatgttgatcatgagcattaaatatgcagagtggctaaatagcctttcccatcatcgcttatatcaacagaggtttcctgtgtaatggctttttccaggtttaacaataaatgattgttgctggaagatgtttacatgcaagtataaagaatggtttcctacgttttctcagttttcctctactgtgaatattttggcaatccaaaactagaggaatatcagaaaagttttcttatgttattaaaaaaatacattataaattctctgaatctgagttaacacaggtcataccaaagaaactgcatatatgatttacattttgaaaagttcacaccaatacaaattgatgcctaataaaaactgaactgtatctcaaagccattccacattgtcttcattcaaattgttcagtgggataaatccattgacacaatgtgctttctttactacctgtatatgccacaatttctctatcaaatatgaattctctgatgtacttcaaggatggatctaagcctaaaggaccttctgcatttgttacatttaaagggtttctcaccagtatgaactctatgatgtatactaagttcatggctactattaaaagctttcccacactcttcacacatatagggatttccatcagcatgaacgctttcatgtctaacaagatatgaggcacagtgaaatgccttcccacatcttttacattcatagggtttatcactggtatgaattctctcatgaataataagatgtgaagcatgactaaaagtttccccacattctttacattcataggacttttcaccagcatgagttcggtcatgatatatgaggcttgtggcatgacgaaaggccttgccacattccttacattcgtagggtttctcagcgctatgaatattctgatgggctttaagtacagaaatgaacctaaaagacttcccgcatttgttgcattcaaagggtttcttaccactgtgaatactcagatgctgagtaagttgtccagatacactaaaggccttcccacattccttacattcataaggtttctcaccagtatgaactctgcgatgtatagtgagtttatggctataactaaaacccttcccacactcttgacatacatagggtttctctcctgtatgaattctctcatgtataacaagatatgaggcacaacgaaaggacttcccacattctttacattcaaagggtttgtaaccagtatgaattctgttatgatgggcaaggtgtgcacgctgactgaaggccttcccacattccttacatttgtagggtttctcaccggtatgaatattttgatgtattttaagggatgaattgagcctaaaggacttcccacatttgttacattcatagggtttcttaccactatgaataccctgatgtcgagtaagtcgtccatgcacactaaaggctttcccacattcctcacacttataaggtttctcaacactttcaaatgtatgaggtgcagtaagttgatggccactactaaaagcctccccattttctttacattcatagtgtttctcccctgaataaattctctgatgcatggtaagttgatacctacatgtaaagcccttcccgcattccttgcattcatagggtttttctccagtatgaattcttttatgacccacaaggtgggaaaactgacgaaaggcctttccacattccttacattcatgtggcttctctccagtatgaatactctgatgtactttaaggcctgctttgagcctaaaggacttcccacatttgttacattcaaagggcttctcaccagtgtgaatactctgatgtcgactaagtcgtccatacacactaaaggccttgccacattccttacattcgtagggtttctcaccataatgaaatctatgatgtacagtaagttgacggctagtcctaaaagcttccccacactctttacattcatagggtttctcaacatgaactttcccatgttgagcaaggtttgcaggataactgaagaccttcccacattcttcacattcataaggtttctcacgagcattaattttctgatgctttctaaggtctgtaagatggctaaatgccttcctaaacttttcacattgatcaggttcctcactagtatgaattgtttgatgtaccatgagttctgtaagatgactaaaggacttctgacattgcttacactcatatggtttctgtccattatgaattctctgatggagagtaacacatgagtgtttcctataaagctgcattttcccatcgctgattatttcacatcttgaatccaaatctagaagacataaaataaaaacattttattggatgagaaaatgtcaatgttattgtagaattaagagaaattctcacctattacagatgctaactcgaaaatacagttataaaatataaaaaatgaaaggagagctaaaaaaatgagtttgtgcagtggaatgcagccttacacacacaggcacacatacacaaagagacacacacacacacagagccctgttttgtagtgtttgccaagatctctggtgtaaatactcccactgagggcaatttctagctgtcaatttaatgcagatttattaatatatgtgcataactggctctagaatgacagaactgaccagctgtaccacaccccctgtatataaatttatatcatatgctaagaatacaggcaagtatcgatatggaaatagaagagtaaaatggaagaattccagcagattgaacatctgtaggaccagaagtaataagaaaatgtcagggtaagataactaaatagaaactcagtatcttatttaatatatagagaaaagtaggatacacggtcatgcatagaaaggaataaactacagtttcgggaacacccatatttcagggaagattttcattgaagaatgatcaggtttacagcatatgtcgatgtgatatacatggaaattataacataaagggtaaggaaatcatgacggagaaaatgggtacacatcataatcatgggcattcagtatcggcaggcagggagttcagagtgaatatttatctcaataaaaaggaaagaaaataagtaaaagatcactacccaacatttaggaatttaagagcaaggtacaggaaagcaggaaaataaagataaaagcagaatgtgatgggttaggaaacggaatagtgtcaacacctaaatcaaagacatggtgtttacaaaaatcatcgggtgaaatatgagctaaagcaaccaaaaaagaataaaaaataaaaataagaaacaagggaaaataagaaagagattttatttaaattatgagagtatatatacatattttgaaagtattaaaaacagtgaatgattttgtaggaatattcttcaaagatgaccctaaaagtgaaaagtctaaatagtcaattgtcatagatgaaatacaaaaagctgctaaaaagacagttaatatgagcacattttaccccctatcttgtaatttctcaatatctgaatttttaaaatgtgcacataagatattccagagaaacaattcaggaagggaacaggtaacatgaacctgaaaatataattaaaaaaagaaaggaagtcttcaaagacttagagttgtgagtaaacaaaacaataaaaatagtagtgttgaatatgaattctaaatttctcttcaaagaattaatctatcagtatgttcaatctttgccttctacatttaaacttaacttcctctaaagcaacctttttcgattacctactccaccctaaatcattctgatcacctgctccaccctaactcattccagttacctactacctgctctgccctgactcccgccaaagcgctcaccctgtcattctctttaaattagccaatcagaattagtttagcctgtgcggtctaaccctagccaataggggaacgacacagcagcaggggacacgtgcgtcagggataagaaccccttcccctcccttgtccaaatgtgtgcccaccattgctccatcggtgaaagcgcacacttctatacaagtaccttaccttgctgaaaatttaaaaaaaagaaaattttatattcgagtgctatttcttttgcagcatcgaaactttatttataacagtagcatacccaggtttggagccaggctcaatggctaatgcctgtcatgctagctaatatgattgcaacatcagaacattaagacaaagcttagaaaaacacactggaaatgatggacaacataggagatataaccatgggggggagacagaaaaggatgaaaatgcaaattatacaactgaaacatataatcactaagagtcagtaaacttgattgatcaatagaaattattcaacttgaaatggagagagaaaaatggtttaaaaaattttagctgggtgtgatggctcatgcctgtaatcccagcactttgggaggctgaggcgggtggatcacctgatgtcaggagttcgagaccagcctggccaacatagtgaaatcctgtctctattaaaaatacaaaaaattagctgggcatggtggcgggcacctgtaatcccagctactcgggaggctgaggcaaggaaatcacttgaacctgggaggcagaggttgcagtgagcagagattgcgccattgcactccagcctgggcaacaacagcgaaactccatctcaaaaaaaaaaaaaaaaaaaaaagaaagaagaaaaaatgtgtaaacagctgtgggaataaatcaaaagatatgattgaaattataaactaaaaaacaaagattttggcaggaaaaatatctcaggaaatagcaattgaaaacatctcaaatttagtgaaagaaataaatttgtagaattaagatgctcatttaatgccaagtaagatatgttacatttactgataaaagcaaattagtttgttgccatcagacttactatacaaaaaatgctaacaagttatttaggcccaaagaaaatactatcagagaaatctgaatcttcagaatataagaaaagcatcacaaaagatgatgtaaataaaataattttttgctccttaagttctttaatatgactgttaaaagcaaaactaataacactgcctagtgaggtttacaacatatgaagatgtgatatacatggaaattataacatgaagggtaaaggtggatataaacctataaaaatacaaggtttatacatttgttgagaaagaacaattctatctagctggcgaaacgtcatgtatattgtatactataatacctataacactacctaaaataaattactcaaggagatacaacccaaaagtcaacaggtaaatttatttatttatttttatttttactttttttttttgagatggagtttcgctcttgttgcccaggttggagtgcaatggtgtgatctcggctcactgcaacctccgcctcccaggttcaagcaattctcctgcctcagcctcccgagtagctggaattacaggaatgcatcaccatgcctggctaattttgtatttttagtagagacggggtttctccatgttgaggctggtctcgaactcctgacctcaggtgatccgcccgccttggcctcccagagtgatgagattacaggcgtgagctaccacaccccaccaacaggtaaatttaaataaatagcaaaaaaaaaaaaaattgaaataatcaaaattacaaaaggaatggacagagaaactaaatagagaaaaaaagtaaagtagtagacctaaatgtaatcatgttaataattacataaaatgtttagggtcaaaacactttaattaaaaggcaaagattaacatagtgaatgacccatcacctcacacccatcaggatggctactggtaaaaacaaaaacaaaaacaaaacagaaaataactaatgttgaagaggatgcagagaaattggaacccttatgcactatgtaatggctacaaggaacatactttaaagacacaaaatattaaaagtaaaaagatggaatcaatataacaaaccaaaaaaatggtgggctatattaatatcagacaacatagatttcaggacaaagaaaaacaggaggactcaagaaggtgcatgtcgtaacataaaagggatcagtctatcaagaaaacataaaaatcccaaacacttatgcacctgataacagactctcaaagtacataaaacaacaactgattgaaatgcaatgaaaaatacgtaagttaaaacataactggaaattggccaggcgtggtggctcacacctgtaatcccaacactttgggaggccgaggtgggcagatcatgaggtcaggagatcgagactagcctggccaacatagtgaaaccctgtctctaataaaaatacaaaaattagctgggtgtggtggtatgcatctgtagtcccagctactcagaggctgaagcaggagaatcacttgaaccccggaggcggaggttgcagtgggccaagaccacgccattgcactccagcctgggtgacagagtaagactccgtctgaaaaaaaaaacaaaaataaagaaaaaaaatatataactggaaatggaaatatttttctagaaacaattcccagaacaagtacacaaaaacacggtaaaaatatacaagatttgcacagtattaaccaagaaactacatgagatattcacagaacattccacccaacaccaacatatacaatattctcaagcccatgtggaatatttgccaagagggcccacacagtacataaaacaaatctcaattattatttaaaacaattcaagtcataaaaagcatgttctctgatcataatggcactaattataaatcactaaccaacactgaaacatccttaactgtttagaaaacaaaccaacatacttctaaataaaccataggtcaaagaagaaatcaagaaggaaattagaaagcaatctgaactgaatcaaaatggacacacaatgtatcaacttttatggaatactaactaataaagaattacctaggggaaatttacaacactaacatctatgttagcataaataacaacaaaaaaagacctcagttggctgggtgcagtggctcacgcctataatcccagcaccgggcgagcgggcggatcacaaggtcaggagatagagaccatcctggctaacacggtgaaacctcgtctctactaaaaatacaaaaaattagtcgggcatggtggcgggcgcctgtagctattcaagaggctgaggcaggagaatggcgtgaacccaggaggtggagcttgcagtgagccgagattgcgccactgcactccagcctgggcaacagagcgagactctgtctaaaaaacaaacaaacaaacaaacaaaacaaaacaaaactcagtcttcgccttaacagaaaaagaggagcaaatcaaacccaaagcaagaagaataaaaataataatcatcagaaaaaataataaaatagaaaactgaaaatcaatagagaaaaaaatcaatgaaaccaaaagccgattatttgaaagatcaatgaaattgataaacctccacccaaaggggagaaaagggaaagaaggcataaatgacccatttcaggaataaaaaagggattatcactataaatcataaagtattatgaacaaccccatgccaatcaatttgacaacttagatgaaatgaacaaattccttgaaagaagcagaccaccaaagcttgaccaagaagtagataaagcaatgaacactaccatccagtaaataatttaagctggtcgggcccttcagaaaacagtttgccagggccgggcatggtggctcacgccccagcactttgggaggctaaggcaggcagatcatctgaggtcaggcgtttgaaaccagcctggtcaacatggtgagaccctgtctctactaaaaatacaaaagttagccaggcatcatggtgggcgcttatagtctcagccgcttaggaggctgaggcaggagaatcacttgaacttgggaggtggaggttgcagtgagctgaaatcgcaccactgcactccagcctgggcaagaaagcaagactctctctccaaaaaaaaaaaaaaaaaaaaacttagatgcatgttcaacttccaagaaaaatacaaagcaccaatttttacttaagaagaaattgaaaatctgaaaaagaaaaaaaactatatttctttctcttcctttctctctctcccccacccctgctcccttctctctctttctctctcttttgttctcataaagtgattaaatcaataacccaaacacttcctataaaaacaggttgatgccaggcatggtggcttacatctgtaatcccagcactttggggggccgaggtgggcggatcacccgaggtcaggaatttgacaccagcctggccaacatggtgaaaccctgtctctactaaaaatacaaaaattagctgggcagcacacccatagttccagctgctcgagaggcggaggcaggagaattgcttgaacccaggaggtggaggttgcagtgagccaaaatgccgccacttttctccagcctgggcaacagagcaagactctatctcgaaagatggaaaagagaggagaagagaggagaaaggagaggagaaaggagaagaaaaaggagaggaaaaaggaaaggaaaggaaaggagggggaagggggaagggggaagggaaaaacaaaagaaaagaaagaagaaagaaatagctggacatgatgtgtcctgtaataggaactgaggtgaatacaccttcagtgcaaagtttgaggttcgtctgcgtaggagttaggccgtgttcattgtgtgctgtagctgtgtttgtgttgcagcttcaattcttccagtctttatttatgtcttctctttgggtttccctagcaattctttcttaaatggagactgtcttgcaggtctctcagttggaatccacaatttttactctgtagctctgctgaggaggaggtaaggtatttcagaggggacgctttctgtaatcttacgattagcactctcttccccaccgtggccagacggctcgcgttgtaacttgacaagaatttcttaatttttttttttgagacagggtcccactctgtcacccaggttggagtgcggtattgtgatctcagctcactgcaacctctacttccaaggctcaagtgatcctcccaccttagcctcccaagtaactgggattataggcagtgccaccacacctagctaatttttcatatttaggttggagtgtggtgttgtgatctcagctcactgcaacctctgcctccaaggctcaagtgatcctcccaccttagcctcccaagtaactgggattataggcagtgccaccacacctagctaatttttcatattttttgtagagatggggtttcgccatgttggccagggtggtcttgacctcctgtcttcaagtgatctgcccgcctcggcctaccaaagtgctgggattacaggtgtgagccactgagcccggccaaaattcacttttcttgatatacagttctatgagatttggaaaatgcatatggttgttcataaccacaatgtggatatagaacaggccgggtgagatggctcacacttgtaatcttggcacgttgggaggctgagacgggtggatcgcttgagcccagaagttcaagaccagcctgggcaacatagtgagaccctgtctctacaaaaatacaaaaattagctgggtgtggtggtgcacacctgtggtcccagatacttcagaggataagactgtgccactgcactcctgctctgggtgacagagtgagaccttatctcaaaaacaaaaaaaaggttgggcagggggatatagaacaattctgggccaggcacggtggtttacacctataatcccagcactttgggagtctgaggcaggaggaacacttgagcccaggagtttgacaacagcccgggcaatgtagggagacctcatctctaaagaaaaaaaaattagccaggtgtggtggtatgcacttgtggtcccagctactgtggtggatcacctcaggtgatctgcccgcctcggcctcccaaagcgctgggattacaagcgtgagccacagcgctgggccttcattggctatttcatgctgagatatccatttcttctccacatcagaagcctcctcgctgagaagggaaatttatgaccaatgtttcaaggatgcgtttaccaaatgagatgaccacttccacgagggctatttgcatacaaaaatggctgcccctgcctgacttgctcttacctgtacactctcctcttgtttcttccctcacaatcatccatggctcttttccttgctccaataaggtgattaaatctggcttagatacggaatgtcctgcttacaaagaaaagaagtgccacaaaatacggaaatcaactttgaaggtaaaatttaaaattacaattgcaataaatgaaaggtcaaagtgatactgagtaagattttagagaagagtgagggaaataaagaaaaagatcacccagggagagtcaatgtttttgtttgctggttttcaaaaaaaattttttttttttttttgcgacggagtctcgctctgtcacccaggctggagtgcaacggcgccatctcggcacaccacaacctccgcctcccaggttaaagtgattctcctgcctcagtctcctgagtagctgggattataggcgtgcaccaccatgcctggctaatttttgtatttttagtagaaatggggtttcgccatgttggccaggctggtctcgaactcctgaccttgtgatccgctcatctgggcctcccaaagcactgggattacaggcatgagccaccgtgcccagtctcaaaagaaatttaaacttatatgtcctctaactgtagaaagcaagcataaagtggttgaaaacacatactctaaagcctgggattggctgggtgcggtggctcatgccttgtaaccccagcactttgggaggccctgaggtcaggagttggagaccagcctggccaatatggtgaaaccctgtctctactaaaaatataaaaattatctgtaggtgtggtggtagtgcctctaatcccagctactaaggagggtgaggcaggagaatcactttaacccgggaggcggaggttgcagtgagctaagatcgcaccacagcactccagcctgggtgacagaagactctgtctcaaaaaaaaaaaaaaaaaagcctgggatcaattcctgactctgtcaccttccagctgtgtgtgaccttgggcaagttacttacactgctggtcagtattctcacttataaaattgggaaaacaataaagctgttgggagtattaaattacttgatatatgagtaaagtaattagaaaaatgttggtgtggaaatcacaatgctagctgttcacattacactgctgcaattattttactaagactatacaagaagagatatctatagtatattcatcccattttacatgtgattttcatggattataagcttcaaccataaatcaaatgaattctgtctcaggaaatggactactttcttctcaattttaagtaagtttcatttatccagtccaccactctatgcctatatgaacagtctctttcaataataacggcaattcagcaccctctttcaaagtaatatcactgcaaatggatcagataataaaatggagcactatagcaattctgtgcacaaaataaataagaaacctgaacgccctgacaatggttctacaatgaacaccagaaaattccaagctaaaccactggttcaacccacttactgggttaaagagacaaataaaagaggtatcagagggaggtgtgaatgtcactgaaagatagagaagatgaaagtgttgaaaggacctgccattactgactcaaagctgaaaccacctcaatagaaatagagaaaataaatttagtttcttaaaaggcagccctgaaaaccacaacagaaaaagaatgtatcctacgaaacagatgattctaaattattctaaatcattccaggttgataaacatacccaatgagactaagttgtcatagttctccatcatcacctcctggtacaaggtcttctgaaccaggctgagatattcccactcctgatgagagaagtctatggccacatccccgaatgttattgatccctgaaacagcaaacccatgtattactggggaaattccaaaatggagtggaggggccgggcactgtggctcacgcctgtaatcccagcactttgggaggccgaggcgggcagatcatgaggtcaagagatgaagaccatcatggtcaacatggtgaaaccccgtctctactaaaatacaaaaaattagctgggtgtggtggcgcatgcctgcactcccagctactcgggaggctgagataggggaatcacttaaacttgggaggcgcaggttgcagtgagccgagattgcgccactgcactccagcctgggcaatagagcgagactccgtctcaaaaaaattaaaagaaaatggagtggatggccgggcgcggtggctcacgcctgtaattccagaactttgggaggccaaggcgggcagattacctgaggtcgggagttcaagaccagcctgaccaagatggagaaaccctgtctctactaaaaaaaccacaaaattagctggcgtggtggcacatgcctgtaatcccagctactcaggaggctgaggcaggagaatcccttgagcctagaaggcagaggttgcagtgacctgagaatgctccattgcactccagcctgggcaacaagagcgaaactccatctcaaaaaaaaaaaaaaagaaaagaaaaacgaaaatggagtggaggagatgaaggagtgcattgcagcagaagagcaatataaccagcatacagaccagaaatctatgctatcagggaggggaatgaagcagaatttatacatatttttgaagaagcttgaaacacaaataaaactttctgcctgttctgggacacttcttaggtatctgacctttttgaaaatgacaaaataataatgtttttctattaaactaaatcattattatgcacataatgccctggtggtatctgcctcataacttctcaatcaatgtgtgttaactgaggaatattttgacttggaagagaatttaaacttttaatcaagagatgttttatgcaaaatatggtacagattctcaattttagaaaactaggtttcctgtgacctcgtggtgcaacaatagcgcatctgactcacgcatctgactccagaaaactaggtttccttaaaattaataatttcttcaagcatcaagtacttcattacattaaatcttaccatgagcatttttgtttgttttgacaaaggattttatcatgacattattattttatggtatttgtttttcaggactttctatccaaatccacgatttctgtgtttacaagttccaatccaatagactaattcacacaaaacatgagattttaccctacctgaagatttagatccttcaatgccaatttccaccttatctagctgaaaaattcagatgtctggaaaatttcaaagacttcccatggatggtcaaatggaactgttgtctcaatcgcaacaaatgacaaaaccaacctgaaatgcgtattatctgtactcaaagaacttgactcctttcctctgtatcactgcccaaaatagaagaatgggcacctagaggacattaatttggtcaataacaacatgaatgctagtgaatttgcagtggcccacctagcgaggatgctgggtgatgtggtacatattttactggaagaatgagaactggagattaggttaactgagcaccgtctcacgaaggtaacttcaggaaaaatgatgagaagacatacatgacctaaaaaatcacacacaaacctccacatggcgagaaatatcaacttacataggacatggtttgagactggcaagagttgatcagtccttggcgtttctctaccagaagagcaaagtcaaaagaaccaagacctgaaagaagagaagaccttgagaccagctgtgctttagtggtccccataggactcaaggtaatagtactgttttcctcttccattccaagttacaaactacctcctctcacatacaatttgggaagattaagattctggataaacccatttcctcccccactacccaagggcctcacctacacagagtcatacattagaaacatactgtcatggaaaccagacccagataattcagtaggaaattttctggccaatgtacgatgttggtgaggcagatggggacctcagattaggcagccctgtcctgctttgagcagaactacctctttccattccctcctttaagggtaaaaacagggaacatcatccataccagaacctctttttagtcttgaaactggggaaattggtcaagatattggagacagatggcgagtgttcagcattctaagtctagcaaagcttcctagttaaatatataacagactatcactgtcctagaatacaaactagtcattaaatgtgaaattgagaaaaattcaaggacatgaaaaatatcagaaacaatgtcaacataaagatcagactgaccaatacatttatttttgtaaaatatataaatacatatccatcaatacagagagaaaggctggcagacagataatcataaaataggcaaggtggcatgcacctgtagtcccagctacccaggaggctgaggcgagaggatcacttgagcccaggagttcaaggttgcagtgagccatgattgtgctactgaactccagcctgggtgacagagcaagactctgtctccaagaaacaaaaaagtgcttatagtcatagtgcttatatctcactatgtattccattttggctgaatacatgaaacaactaaataaaactaaaggaaaagtaaataaacctttgcttagcaacttcccataatcagagtttgataaatagcattccctatacttttgtgtggctcttgattttttcattattaatacttccttcacgattattgtaagcacggacatattaacttgaaacatgtatgtgtttccaatttgttaaggtgggaatttcaacaaaattattttttctctaaatttaaaatcatcttactgaatggcttatcttctgtgggttcctttgggtccccaaacctaaactcacttcatcaccggttctcagatatgttagaattgtgtctccaacaacatggggaactgtccctgagaaatctcctctgtgaatggatgatggtctcaatacagctttatttcaggtcttcttaacagaagggtttatttcgttcctaaatctggcaggtaggtcaggatatcctctagatagctgctgaatttcctcatgcaattaattttgctttctatctagtatcattacagtgaaaactacaaggtttaaaagatgtagtataaaacctgtttatcaccatacatagcccatagactcagtgtaatttgttcatagcctgactattgctatactcagactgatgtctctgttacgtgacatcaccaagtagttcacctaaatctctccaaacagactctatcacacactgccttaaacttcctcctattcagatttgactttccttcatagactgtaaaagtatttcagaggaagcaactcatcttttcagtgattgtcccatttcaaatactgcaattttcaggtgtggcgtagtagaagcacttaataaaagtctgattttttttttttttttgaggcaaagttttactcttttgcccaggctggagtgcagtggcatgatcttggctcactgcaaactccgccttctggtttcaagtggttctcctgcctcagcctcccaagtagctagctgggattacaggcacctgccaccatacccacctaatttttgtatttttagtagagatggggttatcaccatgttggccaggctggtctcaaactcttgacctcgtgatctgccagcctcagcctcccacagtgctgggattacaggtgtgagccaccacgcccggcccaaaagtcttttttaccacaaaattcacaggtacacttgtaagaatttttaaaaaggaaataacgatagaagtacacaaccaatacgtacaatacattcatcaaagataatttttgattatcgaaattaaaaacacaaatattaaaagcacaatagggagtaggttaaacatattattctccggactatggtaacatcctatgccatgattactaagattgatcttaaatcatataatcaaaggaaaatagtaccaaggatgagttagtaaataagacaggtttaaaaacgtatgcacccagtcgggcgcagtggctcatgcctgtaatcccagcactttgggaggccgaggtgggcggatcacgaggtcaggagatccagaccatcctggctaacacagtgaaaccccgtctctactaaaaatacaaaaaaaattagccaggcgtggtggcgggcgcctgtagtcccagccacttgggaggctgaggcaggagaatggcgtgaacccaggaggcggagcttgcagtgagccaagatcgcgccactgcactccagagcaagactccgtctcaaaacaacaacaacaacaacaacaacaacaacagcagcagcagcagcagcagcagcaacaacaaacatactcaccctgtctccagtaaaaataattttaaaaaaaattagctgggcatggtggcgggtgcctgtaatcccagctacttgggaggctgaggcaccagattcgcttgaaccaggagaccgaggttgcagtgagccaagatcatgccactgcactccagcctggatggcagagtgagaccccatctcaaaaaaaaaaaaaaaaaaaaagtatgcaaaaattagttacgtggtatcctgctgaaattaagaagacaggctgtcttctcactctcaaaagtgatactgagttttgccttatgagagatgctaacatatgaatgcctgtttccccatcagcaaataagggataggaatatatcctacttaacgagacagttctgaagattaatcaagatgatctatagaaacacgaaaaaagtaaaatatgatagctactgtaataacattatcatcaaatgttaaaaaataccacatgctcattaatccgttattataaaaggaacttaattctgttgcttcctgtttttctttctttctttctttttttgaaatggagtcgcgttctgtcgcccaggctggagtgcagtggcacaatcttggctcactgcaacctccacctcccaggttcaagctattctcctgcctcagctctccgagtagctggaactacaggcgtgtgccaccatgcccggctaattttttgtacttttagaagagatgggctttcactatgttgaccaggctggtctagaactcctgacttagtgatctgcccacctcagcctcccaaagtgctgggattacaggcatgagccactgcacccagccactttctgtttcttaaagtttgtgcttcatgggctttctcctactcataattccgaatttacaaatttcatggcccacctttaagaaaatacaagtcttctttaaaaaaaaaaattaggttttttttggctgggtgtggtggctcacgcctgtaatcccagcactacaggaggctgaggcgggcggatcatctgagttcaagaccagcctgaccaacatggtaaaaccccatctctactaaaaatacaaaattagctgggcatggtgatgcatgcctgtaatcccagctactcaggaggctgaggcatgagaattgctgaacccaggaggtggaggttgcagtgagctgagatcatgccattgcactccagcctgggccacagaatgaaactccatctaaaaaaaaaaaaaaagatgatcagataagtaaggagaaaatgcccctttccttactccccagcaggtacagaaaacaaggaagataccactcagcctcacatacattcaaagaactggatctaataaagtgctaggtcaagaatattaaggagagtgaatcttattttcctgccaaatacaaacatttatgtgagtatttgtaaatatcacaatacctatttgttattattactgaactatctttggaaatattaccatacttgcaagacatctggaaatcatagattaccatgcttttctctgcagtaactttgcatttctaaactactaattctgagaggatgtcttcatcatttgtgccctgttaagttttaaatcgcatttttaatacctaaaaggtataaaaacttggattgtttttcacctctgaaggaggtccctggtagctccctctcctcttaaaatgcagagatatatgaaagcccatgtcaaaagacctagttgcaacacattgacttacagatctaatgggctttgtgattcatgaaaggggtagcctccattgtacaaaatagcgtaagagctcctactgagcaatggagaaacagtggattttgtaaggtggaaacaaataagagaactatagaaaaaaaaattgattggtgactatcaggctacttcagtttacttttttctggaaggttaagcggaggtcatttccttattatgctgactcaggtagactggagtctcctgttttcaggaaaaactgatctgtttggaactctacctgctcccttaaagtttcagttttgtaatgtggcttttagcatgagtgacttcattttggtttagtctggtctgttggagcctagtgcagaagctcagtccaaagtaatggtgtctcatcatactggttttatatccatggttgggttagattcctttttctaactaaaagtaggagtctgtctatttcattaattctcttctgtaaagacaaaaccacacacaagtgctcacacatgaaaactgaaaacatatacacccaaatttgtaaagtgattctctctgggcagggaggtttgggttattctaaatttcttctttgaaactatcttagggagtgaaatttttgtgacgaaactgccttaattccatcatcataaatataacttcaagatatttcaaagtagtaataaactatttctaaaagtatccttatggggagagggtacatgtgtcattaaaagaaatctaaatattaggcctagaatgaaaaatcagcgtgactaaaacatgtaactctttgtcttcttgaacagcctttagctgtgtttcttctacataactagaaacaattcactataaagattctttccttagtggacagggaaatggcttctgcacatctaatgggaacaggtacacaaaataggtccaataatttggggcacacattatatgctcagtaaatgtagccacaaccctttcattcctctctgaaaaaccaattaaataatcattttggatacaatccttgcaaaagtttttgcaaaattccctttgtttaattttaattttaaattttatttttttgagacggagtctcgcgctgtcgcccaggctggcgtgcagtggctcgatctcggctcactgcaaggtccgcctcccaggttcacaccattctcctgcctcagtctcccgactagctgggactacaggcgcccaccaccacgcccggctaattttttgtatttttagtagagacggggtttcaccatgttagccaggatggtctcaatctcctgacctcatgatctgcccgcctcggcctcccaaagtgctgggattacaggcggaagccactgtgccaggcccaaaattccatttttaaaaaatgagctgcggctgggcgtggtggctcacgcctgtaatcccaacactttgggaggccaaggtgggtggatcacctgaggttgggagttcaagaccagcctgacccacatggagaaaccccgtctctactaaaaatacaaaaaaaaaaaaaaaatagccaggcatggtggcccatgcttgtaatctcagctactcaggtggctgaggcaggagaatcgcttgaacccgggaggcggaggttgcagtgagcagagatcgcaccattgcactccagcctgggcaacaagagcggaactcagtctcaaaaaaaaaaaaaaaaaaaaaaaagaaagaaaaagagttgcatatatagtttgagaactgtgatccaccactgtaactctaaatagtgttaaacattagatcacagctatttatcctgtgacagattctttacaaacataaatcttattatttgtataatatccaatcccttggacgctgtataattttcttaaccattcccataatctcgttcattagttttctgcaaaaccattcaaaggtataaaactctttgattccagatctaaaacctgagtctaaataatttggattatggacatcctagaaaaatgcaaattaacaaacatgtacaggaattctttatagaatttcagggggtttgtgatgtcccttatgcccataagggcattggtctacagacagtacaccaatgaccgagaattcctattttggaaaacttaaattctggctcacttccttcacatcacggctaagttcatattcttgttgcttttgatctacagaaatccaaaacggaatatccaaaattgcctcataatacttagcgcttatgtttcccccctccaaggctgcaggcgcgtaatttcatacacacgaccagaaggaagtatgttggatggaacctgcaatcatccttcactgcaggttcttggggtcagaattcaaggccgtgtttgttaaacatgtaaatgaaactccaagaaccgggaggtgggggcggagtaacaacccttttcaggagggaatcctacactcgaaactgacaaaccctgccagaccaaattttagtcaggctactacaccttcagctaggcccatctgtacacttcactgtaaaatctggctatagcaaagaactattctaagtcagtttagcaagaccctttcgcctccgtatcttcatcctccaccgtcccccaggtctctctctccagaaataatcctgttaggtgcgtttagtcagaatcttccttaacccagacatttcctcttagtaatttctcatccagtgatccctaaccttcttggctataaattcccacttgttcatgctgaattcggagttgagcccaatgtctgttacccactgcaaaatctcacagccgggatcccaatacctaccaccatggtcctgaataaagggttctttgcatgctttaacaagtgtcactgaatacttttttatttaacagaatctatcatacctttcttaagggcaattactcttctaagcttctcatcctatctgtttcttctcactggaaatcttcatctaagactcagtatctgatttcccattgggaccatttctctgttgtagtcgtactaggctgaggaaggcacaggaagcagcagggaacctggagccaagggtcaatagaccccacagagcccagcgaagcacgctttacaaaggacacacacggcatgtacaggtcacacaaggtcgactacgcacccctcacagtcccgcaactgcacccacgtcacacaggcaagccggtcctgtcgccgctgcgcggtctctcacgctccccgcctgtctcctagagacgggcccctcctccgcagctccagcaccctagggcctgaggaggcgggagactcgcccggcccgcctgggggcctccgcgctctgagcgcctcctgcagccccactctcaccgccacgcagggtaccacgcgggcggcgggctggggctgcagaggctcccgcagtgacctgcgccgccttcttcaggtggaaccaaaaggtcccggaaccggagccaggggtccaagttttctccgttgcctttgtaatatgtagtccaagccagaacagtcaggaccgcaggtaccggtgagaaatggagtccagaatcctaaaaacctacgagaaatacggcagcgaccacttggaccgcgcctcccacccaccgctcgagccccggagacttctgggagtggccgccttgcctcgagtgcgcatgcgcagatcggccactactgggcccctggcctgaggcttagggtggagttagtgcgttcttagggccagtaggaggcgagtctgagtagaaactgatccaggtagcctcggaagggatcacctgctggatgggtgtgagctcctcagggtggggcgccgaaaccctcatggctcctgaggtagagccggcctccttggtaacacatgggactgggacttttaataccacccgacaggcccagcttgtctcgtcaagcgctaagtaaatggactcacgtcctatatgagggtttgaagttccatcacattcttcaatacatgacattatgttcttcatctttggacacgaatatatttgactaaaaatttgactaaaaaatcatctgaagaaataactgctaaatagttttattatttttgttctggaataggcttcttgaagataaaataagaaatttaaaaaatttttttgatccttcatgtaatactttgtaaatcttcatagttatttagaagcatccaaaatttccaaatggtaaaaaacgaataagaaaaatttttaggtaagtaaatttgggggaaatatttacaacagctaaaacggacaaatatttaatagtccgaatttcctgtttctttggcttaataaaatattgatgaatacaggctgggcacggtggctcacgcctttaatcccagcattttcggaggccaaggcaggaggatcagttgaggccagaagttcaaaaccagcctaagaaacatagtgagacacccctctcctcctcccaaactctaccaaaaatgaaagttagcctggtgtggtggcacacgcctgtgggcccagctattccaaagacaaaggtaggaggatcagttgagcccggaagttcaggcttcagtgaggtatgatggtgtcaccgcactctggcctgagcaacagagcaagaccttgtctcaaaaaataaataagtaaaattaatttaaaaataaaaaatatttgtctataccctaagaggaaaaggaacaaaactaaaaaatcaccattcaaaaatacaaatagtcaaggaaaaaaaactattaaagttacaatttaagaacttattgatcactttttcttctcttaattagttcttggatttgttgctcctgaatctcctgaataatctctcagaaataccacacatagatcaatggattaaattgactccacatattattttctttttcttttttctctttttgagacggagttttgctctagttgcccaggctggagtgcaatggcacgatcttggctcactgcaacctccacctcccaggttcaagcgattttcctgcctcagcctcctgagtagctggaattacaggcatgcatcaccatgcccagctaattttgtatttttagtagagacagggttttaccatgttggtcaggctggtctcgaactcccaacctcagatgatctgcccgccttggcctcccaaagtgctgggattataggcatgagctactgcgcccggctccacatactattttcaacaaggataccaaggcattttaaggaagggaagagtagtctttgttgaaaagactggaattagagatgcacatagaaaggaatgaattgagttccctgcctctcaccatatacaaaatcaactcaaaatggatcaaacacctaggtgtaagacttaaaacagtagaacatttagaaggaaatgtaggcataaatcttctggactttatagtcagcaattgtttcttaaccgtgacatcagaatcacaagcaacaacatcaaaaaaggaaattggacataaattgtaaaacattgtgcttcaaaacccaccaagaatgtgagaagctacccaaagagtgagaaaaattgtttgtaaattatgtatccaataagggatttgtatctagaatatataaagaagtcttgcaactcaataataaaaagcccaacaaaaatgggcaaagtaactgaataagcatttctcaaaaaaaaaaaaaaagtatacacatggctactaaatacttgaaaacatgttctatattaatcattaagaatatgcaaatcagccaggagcagtggctcatgcctgtaatctcagcactttgggaggtcgaggcaggaggattgcttgagcctaggagttcgaaaccagcctgggaaacaaagaaaaagactatgtaaatcaaaaccccaaaaccccaatgagatatactacttaggatgactaaaatcaaataaatatacaataacaaattttggataggatttggataaatagaaccctatatacattgatggtgtcactggaaaatggtagaactactgtataaacagtctggcagttcctcagaagaatgtagagttaccatacgatgtagcaattttagtcctaggtatattctcaagacaaaaccatatgttctcacaaagcttgtacacagatatttatagcagcatgattcatgatagccaaaactggaaagaaaacccaattgttcttcattttataagtagataagtaaaatgtggcatatctacacaatggactattatttggtaatataaggaaatgaagatctgatacaagctacaacatagatcaaccttgaacactatgctaagtgaatgaagctggtacaaaagaccacatatttatgattccttctatgtgaaatttcttctcatataaaatttccaatgtgggctaatttatagagactgaaagtaaattgtttcctaaattgaacggtggcagaaggaattgggatggtggctaaaggctttcatgctggcgtgatgaaaatgttataaaactgtgttgaaggtttcacaactttgtgactacattaaaaactactggattttacactttaaatgagtgaattggatggaatgtgaattatatacaaagttgttaccaaaagaaataaaaaagaaatacagagttttcaacaagtaaaaactgagagcatttgttgttagcagatcttctttataagaaatgttaaagaaaattcttgagaaagaataggacagaatcagaaatttgtatctaaacaagaaatgaagagtcagaattaaagttaatggaagtaaaaccatttttttcctcatatttagtttctctgaaagatagtaataatgttattattattattcttaaaattttttgagatacagtcttgctttgtcacccaggctggagtgcagtggcacgatctcagcttactgcaacctccgcctcccagattcaagcaattctcctgcctcagtctcccaagtagctgggattacaggcacgcgccaccaggcccggctaattttgtatttttagtagagacagggtttcaccatgttgatcaggctggtcttgaactcctgacttcaagtgatccaccaaccttggcttcccaaagtgttgagattacaggtgtgggccactgcgcccagactatcttattgttttttaaagacaggatcttgctccgttgcccaggcaggagtgcagtggtgcaatcacagctcacagcagcctcaactggtgcaatcacagcttatagcagcctcgacctcccaggctaaagaaatcctcctacctcagccttctgagtagctgggattataggtgtgcaccaccacacctggctaatttttaaatttttttgcagagacagggcctcactatgttgtccaggttggtctcaaactctggggctcaagtgatcctcccacctgagcctctcaaagtgttgagattacaggtgtgagccactacgcccagctcaatcatcttttaagcaatttaaataataagatatatttacccacatattagtcatttcctatgtaggtccaaatttccatctgatatcactttccatttgtctgaagaaccttaacatttcttagagtgtaggaaagcatcaatcctctcatcttttagatgtctaaaaaaatcagacatccacaaattttcaccttcgtacaaaagtattttcacattgtatagaattcaaggtaacatttttcatttctgcgctatacaagaattttgctcaactgtcttctaggttatgttggtttcaacaagaaatacttttattcttgcatttgttcctctctatgtagtctcctttctctgctgacttactctttatcactattttaaagcaattagattatgatcagtctttgtttagatttctacatttcttgtgattagaattcactgagttgcttcaatttgtaagtctacagttttcaccaattgggaaaatttttaagcttactaatccttttcctgcaatatctaatcatttctccagagtattttacatctcagacattgtagttttcatttgtggatgtttaatgtggtttaaaaaaacatctcccatgattctcctaaaagtgcttatatttcagccaggtgcagtggcttacacatgtaatcccagcagtttgagaggctaaagcaagaccctgtctctactagaaaatacaaaaaattagctgggcatggtggtgcatgcctgcagtcccagctaccagggaggctgaggtgggaagatcaactgagctcaagaggtcgaggctgcagtgagccatgactgggccactgcactccagtctgggccaaagagtgataccctgtctttaaaaaaaaaaagaaaaaaaaagtgcttatattttggtctacctttgtcaacatatgaaatatcattataattattctgataacctgtcaattctaatacgtgagacaattttgattaatcaattttgctcctcgttatgtgtcatgttttcctggtcctttgcatgtcttgtaacctttttttttttctttttttgagacagagtctcgatcttgttgcccaggctggattgtaatggtgtgatctctgctcactgcaacttccacctccccgggttcaagtgattctcctgcctcagcctcccgagtagctgggattacaggcatgcaccaccaggcccgactaattttttgtatttttagtagaaacgggttttcttcgttttggtcaggctggtctggaactcccaacctcagatgatctgcccacctcagcctcccaaagtgctgggattacaggcgtgagccactgcacccacccgtcttgtaacttttgattggatgctaaacattgaaatgttaccttgccaggtattctggtatatttttcaatatttttgagctttgttttgaaatatagttcacgtaacttgaaaacagtttgatctttttcatgggttctttttcagctttgataaggcaggaccagagcaagactaattagtccaaagctgatttttcctctctcttaagacagtatacttctgagtatccgaggtcttgtgaattatgagggtttttccactttggctattggtaacacctgctattcctggacttgtttgagctatgaggattattccctctattcatttcaagtgggtttttccacagcttcaggtgttttcacatatagctaactggtcagtactttcagctgaagattcaaagggaactccctggcagcgctccagagatctcttcatggaggttgttcctgtctagtactttgttccacataccctggcttctgcaaatcctcaagtttgtgtctcaattcgggaagaacactgggctctgcttctgttaactctccctgagcaatggactgaaaatactccagatgttaagttgggagaaataatagagctcaccttggtggtttctgcaaatggggattgtggtctgcttgttgttcagtgtctgaaaactgtcattctatatatttttaaaaattattgagatgggagggtacatcctaccctgttattatatcttaaaagtaagcaaaattttaatttttttttttttgagatagggtcttgctttgtagtccaggctaacgtgcagtggtgccctcatggcagcctcaaactcctggctcaagcgatcctcttgcctcagcttcccgagtaactgggactacaggtgcatgccaccatgcctggcaatttttttttttactttttgtagagatgagtcttgttgttttgttctccagccttgtctcaaactcctgggctcaaaggatcctcccaccttggcttcccaaaatgtggggattacaggagtgagccactgtgttcagcctaaaattatatcttgctttatctcaataatgcttatttaagaagaaaaagctaaaagaaaaacacttaatgatctcttccataagatcaccaagaccaaggccctgatcaagaaacatgtggttgataatccacatggtaaagctttctttttttgtgattacgtctttgcatgcgtgtgtctcagtgaagaccatggaaactagaggagtatctaaaaattgctcaattaccattaactgtagagagaaaaataggaaggaatagaacataagtgcataaaaatagtaagaatagccaggcacagtggctcacgcctgtaaccccagcactttgggaggccaaggcgggtggatcacaaggccaggagttcaagaccagcctggccaagatggtgaaaccctgtctctactaaaaatacaaaaaattagccaggtgtggtggcggacacctgtaatccagctatttgggaggctgaggcagagaattgcttgaacccgggaggcggaggttgcagtgagccaagatcgcaccactgcactccagcctgggcaacagagtgagactccgtctcaaaaaaataaaatataaatcaatattacaacttttttgcatattgtttccactttaaaatatttaagatgctttcagaccgggcgtggtggctcaagcctgtaatcccagcactttgggaggccaaggcgggcggatcacgaggtcaggagattgagaccatcctggctaacatggtgaaaccccgtctctactaaaaataaaaaaattagccgggcaaggtgatgggcacctgtaatcccagctactcgggaggctgaggcaggagaatggtgtgaacctgggagatggagcttgcagtgagccgagatcatgccactgcattccagcctgggccacagagcgagactccgtctcaaagaaaaaaaaaagatgctttcaagtatctgctaaaaattaacgacttttctttgcttttttagagacaggttctcactctattgcccaggatagagtgcagtagtgccatcatagctcactgcaatctcaaactcctaggatcaagcaatcctcctgccttggcctccagagtagctggtactacaggcatgcaccagtatgcctaattaaaaaaaatttttttttgtagacacagggtctcactatgttgccagggctgttcttgaactcctgacttcaagtaatcctccctcttcggcctcccaaagtgctggaattaaaggcgtgagccaccacacccagcctatgatttttaatatatacctaacattgctcaattaattttgcaaatgataattaagtgcttggcaatatttcattggttaaatccataagattattttttatctgaatagaatataagtattcagaatattcctaatagaaagttttctaataatggaaacattgtatacagtagtctccctcttatctgcaggggttatgttccaagacccccaggggaagcctgaaaccaaggatggcaccaaaccatcctatttttttactaaacatatgtacttatgataaagtttaatttataaattaggcacagcaagagattaacaacaaggaaacattagataaagaggggactactgtatctgtaaagtccaatacacatggctattgaacacttaactgtgactagtcctactggtgaactcaattttatgccttattaaatttaaattaatttaaaatggccacgtgtagctggtggctactgtatctacctgacagtgcagatctagaggaatgtcaattgcttaatatttaatgcaatcaatgctaattatgtgacaaattataattttaacatgaggcaataaaataaaactattagtggatatttactcaccctgcattaaaatttttcacacattaaagaatctgtcattctcatgagggctgctggtaagtatccaaacacgtctaagcagcaatgcattttatatatatatttttttgagatgaagtttcgttcttgttgcccaggctggagtgcaatggccccatcttggctcactgcaacctctgtctcctggattcaagcaattctcctgcctcagcctcccgagtagctgggattacaggcatgcgtcaccccacctcactaattttgtatttttttttttttagtagagatggggtttctccatgttggtcaggctggtctcaaactcctgacctcaggtgatccacctgccttggcctcccaaagtgctgggattacaggcgtgagccaccatgcggggcccgcatcttatattcttgctaaagagttctgaactcctagcattgtattgccaagaacacataatgcttgattttcattgaggggttcatgtggggatgcgtcttttatgtggaacccagtggtaataccacaatgtgcagtgctcacaggcgttgtgcctcgggcaggtacgcagctcagttaatctgttgctttcatagaaagtagaaattcaaatagagtatcaggtgattttggaagtgtttaacaatccagtattaaaactgtaagaaggaaaacaaaataaagaaaaaacaggaccatatgggtttaaagccaaattttatctaacctttaataaacaaataatggcaataacaaaaatttaaaaaattcttaattttgaatgttaatatatgaatgctaataatattaatatcaattttgaatatttggacaaaaatcccaaacaaaatattcataagataaattaagcagcttatcaaaacaataatataccacagctaagcatattatatttcagaaatggtttaaaacaagaaatcagaatgaattataacattaaaatagcagaggagaatgatatatgaacaaagcaaaagaagtgataggatttgaaaaaatataagaagttagccctaattatagagcatacttgcatacaacaaagtaaatattagttgaatggtaaaatattgtactgatttccattaaactgtttaaacaactaagacactggctattaccccaatacttgacataatcgtatttattttaataaaagtaaagaaataataatgattttaaaagaaaattcatttccattcatagataatctgactgaatacacagaaatctcacatactattaaaaatataaatagattaccagtttatggttagagtgataatggcaacatccaaatataatatgatagtatgtgggaaaactatcagtatcagaaaaatcatgaatgcactttaaacagctactctccaggaaaaggatattatatataaaataacagaagaatcaagatctagagtatgtgtgtgtattcataaatcagcaggttgagaaaatgagcaaaagaaacaaacaggaaagtcacagtaaataacatgattggctaataaatacatataaaaaatacttaatgggttagttaaaaaaataattatatttttagatggacaagtggagttactggatacttttatttccagctgaccagactagaaattacaagagtagaagagcatttggaaaagatccaagtatagatacatcagctatgactgcaattatagagttttgttatttacagactcctctgaaacaatattctaagtagagttttaaaaaattatctataacctaaatactgatcaggatgagagtttaaaaacatttaggccaggcgtgggggcgcacacctgtaatcccaacactttgggaggccgaggcaggtggatcacctgaggtcgagagttcgagaccagcctgaccaacatggagaaaccctgtctctactaaaagtataaaaaaaattaggcaggcgtggtgatgcgtgcctgtaatcccagctactcaggaggctgaggcaggagaatcgcttgaacctgggaggcagaggttgcagtgagtcaagatcggaccattgcactccagcctgggcaacaagagcaaaactccgtctcaaaaacaacaacaacaacaaaaaaaacccaaaaaacaaaacaaaacaaaaaaacatttaggtttttcattttgtagaaaagtaacagtagtacgagtacagaaaaaggtggttacttgcctatcatcatgtgagctgactgcattctcccggggattaatcacatgacaaaatgctgaaattccagtttgagggtcattcctttaggtcttggcagcatttcagcttatggtttcatgtcccgattttttttttttttttttttttgagacagagtctcactctgtcacccaggctggaatgcagtggcacaatctcggctcactgcagcctatgctccgggttcaagtgattctcctgcctcaggctccagagcagctgggattacaggcatgcgccaccacacctggctcatttttgtatttttagtagagatggggtttcaccatgttggccaggctggtcttcaactcctgacctcaagtgatccgaccacctcggccttacccaaagtgctgggattacaggcatgagccaccacactcagacttaagtgttagtaggtaatattaatagaaatggaagttccgaggtaattcttagatacactgggttatggaaaggcaaacaaactttctacaccacagtgcacgtcaatcttgtgagaggttaatcatgtggtttttgtttgttccaagagcaggagattgcttcattggcttgtctaagaacataaaccatttttcaattatcaagtacagtggtcatctaacctatagcaaaatcattctgcattgtgttttatttcattatcaaaacttaaaattgcataggggaaatgatgttaatatttaaaggcgaattatttcctttgtggacaaaagggatatgagcatgtagatcacaacgaatgatcacactgacactacagacacaatgaatgatcacgctgacactaaagacacaacaaatgatcacgctgacactacagacacaatgatgacgctgacactacagacacaatgaatgatcacgctgacactacagacacaacgaatgatcacgctgacactacagacacaacgaatgatcacgctgacactaaagacacaacaaatgatcacgctgacactacagacacaatgttcacgctgacactacagacacaacgaatgatcacgctgacactacagacacaacgaatgatcacgctgacactacagaactttggctgacaatgcataatgcgtgatgctccttagtttggaaaagtaatttttatagggctggaagtgagtttaggtagttatcaactgcaatcctgatttccaaaaggtttttaaaaaggtagtttttagaattgatggtatcgtgcacataattcatcccatttataaaactgtatataaagcttagaaaaattacaaggataaacacagatcaacattccttttctttcatttgtctagaatatattgaaccagaagaatgaattgactctgccagaaaaatgactattgcacaattattttaaaagaatcttagagtttgctgatatcatactcagaaattttccatttaccctaatgagtgaaactcatcttgttttcaatcatgttttaaaaattccgatttcctacaatatctatgtcattttgaaaaactatattctttcacaaatataattccttctcaaaatacattagagattgctaaatattttggtataaacatcaaaaattaactctttcttttgagactggttctcgctctattgcccaggctggagtgcaatggcatgatctcggctcactgcaatctctgcctcccaggttcatgcgattctcctgtctcagcctcccaagtagctaggattacaggcgcatgccaccatgcccagctaatttttgtatttgtagtagagatgaggtttcatcatgctggccaggctggtctcgaactcctgacctcaaatgatccacctgcctcggcgtcccaaagtgctgggattacaggcgtgagccactgtgcccggcaaaaattaacttttaatttaaaacattttcttcatatctcttttaaaatttttcttgattatatctagagatttagctcatgttccacaaaatgggagggggtaagatttgaataaaaactagttttatttcctaatcattaatctctttatctagttttattaattttttcttaatattggtatatttgttttcctttcttctagcctcatatattaacattgtttctatccacagatttatagtctaacctttaacaggcagttcatatgtgctacacagagagatgaatacaatgacatctttttgtttcaatccttgtttcctgaattaaagggattatgttttcaaattaacggatcaatgtagcacccatcaaattactaatgcaaaatggaattgttcaatggagagctgacagttgcctctttaagcaagctttacagtgtagcataaataatcatgtaaaaacctgatatgctttcagaagtctgcagcatcattcatgagatgttcttgacaaaaatctcaacctaatgaattttctagacataactgccaatttatgggaaaacaagggacagagcaacaagttaaatcatactgtgaagcagaaatcaagaatgtgggacattctttgggtacttaaaaaagaaaaattcaggctgggtgtggtggctcacgcctgtaatcccagcactttggtaggccaaggcgggtggatcacaaggtcaagagatccagaccatcctggccaacatgatgaaatcccgtctctactaaaaatgcaaaaattagctgggtgtggtggcatgcgcctgtagtcccagctacttgggaggctgaggcagaattgcttgaacccgggaggcagaggttgcagtaagccaagatcgcaccactgcactccagcctggtgacagagtgagactctgtctcaaaaaaaaagaaaaaaaaaaggaaaaattcaaaagcatgaaaaagtggggatattatcctagagaaaaggaataaattaaaaaaaaatcccaaatgcaatgaattaaccaagagtggatactgattagaaaataagtcgttataaaaaatctttgggcacatatttgaagacactatataaattattacatttttccagtatgattatagtatcacagttatccaggaaatttgcatatatttaaaggcaaagggccatggtatctacaacttactctcaaatgatacagaaataacccatacataagcggataaaaagagctgaaataagataaagcaaataacatgaatgtaaacatatatggtgggttactaaacaattctttcattttttctgtatgttaaattaaaatgtacatttcaaatttagggaaaacctccaagacaacaatttacttcttgatagcccattattaattcctacttaatcttaaattgtgaacagaaaatatgaactgttggctattatcaaaatcttggccaggcacagtggctcacacctataatcccagcaatttgggaagccaaggcaggaggattgcttgaggccaggggtttgagaccagcctaggcaacatagtgagaccccatctccacaaaaaatgaaaaaagcaaaagcaaaacaaaacaagatatgcaaaatcttttttttttttttttttgagatggagtcttgctctgtcactcaaactggagtgtagcggtgtgatctcggcccactgcaacctccgcctcctgggttcaagtgattctcgtgtctcagccctccgagtagctgggattacaggtgtgtgccaccatgcccagctaatttttgtacttttagtagagatggggttttgccatgtgcccaggatgttcttgaactcctgatctcaggcgatctgccagccttggcttcctaaactgctgggattagaggtgtgagccactgcacctggtcaaaatctttagacatgctaaaatcatattcttaatttccaaaattatataaaatttaataatagatgagtggctttcagaagctgttctaaattaattatgctattagaatctttcataaaaattaattatcagcaacacaaataatgacgatatctataataggtcatatttatttatttatttattttaagatggagtctcgctctgtcacccaggctggagtgcagtggcatgatcccgcctcccaggttcaagtgattctcctgcctcggcctttctgagtagctgggactacaggtgcgtgtcaccacgcccggctaattttttgtattttttgtagagatggggtttcaccatgttagccaggatggtctcgatctcctgacatgtgatccaccctcctcagcctcccaaactgctgagattacaggcgtaagccactgcgcccggccaatagctcatatttattgagcataacgctatatgccaaacagtcttcccaggttttgacaagtataatttcggccacatccgcataataggactcttatgtaccttttttctttttagatggggcctaaaaaagccaggctggtgtgcagtggctattcacaggcaccatcatagagcactgcaggcttacactcttgcctcaagcgatcctcccgcctcagtctcccgagtagctgggactacaggtgtgcgccaccatgcctgggtttcatgtaggctcttgattatactttgcaaataattcccatagatgataaatatcttggccaatgacacacagggagttatgtggcagtgatgacaggtaaggcatgtgccatggctaaaagcactattgcatatgtgacattaacaagttagtttattagtactaatttttgagacttcaacaatgattgagtggtgtcaggtgtggcgatttaaaaataaaaatatgtctgcaaatgttttgacatttctctctttaaaaagtgaaagtgggctgggcacagtggttcacgcctataatctcagcactttgggaacactgtgggaagactgcttgagcttaggagtttgagacaagcctgggcaagttggtgagacccccatctctacaaaaaatttaaaaattagctgggcatggtgacgcacacctgtagtcccagctactcgggaagctgaagcaggaggatcactgaagcccaggaggttgaggctgaagttagccatatgcactccactggacgacagtgaaagatcctgccttcaaaaaaaaaaggtgaaacttaattcctctcttactgaatgtaggccagacttagtgattttctgggaacaaacagaacgtggcagaactaacttccaaagagagattataaaaaggatcacatctgtcacgtcacaagcacactcaagcagcttatggacaaggccccttgggagaagaaacgacttgccagtataaacttatcagccacagaactaagccatttgaaagcatatcctacagctatagtcaagcctttagataagcacaacctcttgagacacttggagctagaactgcctagcttagctgctcccaaatttctgactcacagaaactgtgagaaaaatacacatttattggcattttaagccactaattcttcaggttctttggaatgtggcatgagataacagattttggtacctagacaagggatgctattgaaacaaaaagctacaaatgtcagaggggcattgggaccacaaactgggtggaaattggaagtgcctggaaaatattattagcagaaacctggatatttttgaggagctcctagtgagggcttaaagaaaactgaaaaatgttactggagactagggggaagggattcttgttatgcaacagcagaaagcaacatggctgcacgtggttactgtgaaaagtacaaaataatacctacagaactgtgtaactggcccaggctcgtgctataatcccagcactttgggaggtcaaggtaggaggatcaagagtttgagaccagctcaggcaacatagggagacttcatctctaccaaaaaaaaaaaaaaaaaaagaattagctagatgtagttgtgcatacacctgtagtcctagctactcctgaggctgagatgggcggatcacttgagcccgggagttcaaggttgtagtgagctatgatcacaccactgcactccaacttgggtggcaaagcaagattgtgtctttaagaaacaaaaacaaacaaacaacagcaacaaaaaaagtgggtaatttagcttaggaaactcccaagcagaatgttgaaggtgtcttgcttcttgttgcttaagtgctagaagtgagataagctagaaaaagactgttaaacagaagtgaaccaggacttgcttttggaaactcccagcctctccagaaagcaaatgatgctaaacttcagaaatagtctctggacaaagataaaatccagagtgctgttagggaaacatagtatgtaggtaaccttagggtatgtgttcattttgatcctctgaaaagcaaaaagcaagatcagatcagaaggaaggagggggctatgaatgaaaaagaggtccaggaaaggcagtgaaagccttcaggccatggtacaagatggatgactctgaaggagagggatgaagcaagattggtagaaaaactatgaaaacgcggggcagtatgaaaacagtttcagcctggctgattcacagttccccagctgaagggtctgggtttcgtaagaattgactagcatgaatacttatgttatgctcagaaaaggagctgggggcagcccataggaagcatggcctcaacattaacacaatgattatttcagagagggagcagagtgggcacttcacaggcaggttatctgttctccaaagaacagatagagtatgactgttaaaaacccttggttaagactccagcaatatctaatgtgacaattatgagaatcaccattcaatgaaacttctataaatggctctgtcagcagcctctgcagaagccctaggtagaggaggccggatttgcacgagagtgaatgaacaagtgagcatgagcaccagggaaaggtgatcctgaagattctgttcatctaggttcagctcacatgcaaagggaagggaattggacttcaggtttttttatttgctgtttgtgtttttgagacggagtctcatgctgttgcccaggctggagtgcagaggcacgatctcagctcactgcagcctccgcctcccaagttcaagcgattctcctgcctcagcctccctagtagctgggactacaggcgtgtgccatcacgcctggctaggcctcggtctcccaaagtgctgggattacaggcgtgagtcaccgtgcctggccagacttcaagtttgaagggtagagtttcaagaatttgaggacatatttttaaaacaccacgactggcattctgagtacaaattgcttatatttctacgtcatgcaaaatatgctcaagaagccacccaaattgcttgagcccagaagttgaaagctgcagtgagctatgagcatgcctctgcactccagcctgggtgatagagcaagaccctgtctcaaaaaacaaagacaaaaacaaaaacagacaaacaaacaaacaaaaaacggctccaaagtcacagctttctcctggcactctcactgtctaagccagcctgccagtgtgagcaagccacctggaaaacagatccttccgccccaaggagccttcagaagactgcaagctcatggaaagaccaattcaaaagcactcagttaagcctcttccgaatttctgaccctcagaacctatgagtgatgtttattgttgtggtaagacattaaggcttggggtaatttgtaatacagccattgaaatctagtatgaaaggcttttggtcatccttttaattaataagttttttttttttttcttttgagacggagtctcactctgttgcccaggctggagtgcagtggcgcgatctctgctcactgcaagctctgcctcccgggttcacgctattctcctgcctcagcctcccgagtagctgggattgcaggcgcctgccaccacgcccagctaattttttgtatttttagtagagacggggtttcatcgtgttagccaggatggtctctatctcctgacctcgtgatccgcccaccttggcctctcaaagtgctgggattacaggcaaaccaccgcgcccagccttaattattaagtttttttaaaaaaaaatccatgccatggatgttgtaggcatgaagaaactgggattcctgtttttttttttttttttcttaatttaccattgaatagtcagatattccattaaaacaggactgacattgaatgctttctaatgtggcaagatctgcattttgaactctctcaattgctaaagccatacctataagactaacattccatcatttctcaccagtgtgggctgtctgatgatgaatggcgcgctcgtactctttacggtcttacacttttatgctcctatgaattctctgatgggctttaagggctgaaccatatctgaaggttttcccacactgcttacacacatagggtttctcaccagtatgaattctctcatgttgaacaaggtttgaagcacgactgaaggccttcccacattctttacattcataaggttttccaccagtatgaattttctgatgttgggtaaggtagccatacattttaaaggcctttccacattctttacattcatagggttttttatcagcatgaatgctctgatgtgcagtaaggtgtgaactacgtctaaaggtcttcccacattccttacattcaaaaggtttctcatcagtatgaatactttgatgtagagtaagatttctatagaaagtaaaggtttttctacataccttacattcatagggtttcataccagtatgaattttctgatgttgattaagatatccatgcaagctaaaggtcttgccacattccttacatttatagggtttctcaccagtatgagttttccgatgttgaataaggtttgagccagtactataggccttcccacattcctgacattcaaaaagtttcttaccagtgtgaatattctgatgtcgagtaagatttctatacaaagtaaaggtttttttacactccttacattcaaagtgtttcatgccagtatgaattttctgatgttgtttaaggtagccatacaagctaaaggcctttccgcattccttgcattcatagggtttctcgccagtatgagttttctgatgttgaaagagttttgaaccagtagtataggtcttcccacattgcttgcattcaaaaagtttctcaccagtatgaatattctgatgccgagtaagatttctatacaaagtaaaggttttcttacactccttacattcatagggttttccacctttatgaattctctgatgtagaagaaagtatgaggcagtggtatagcccttcccacattctttacactcatatggctttttaccagtgtgaactctctgatgtacagtaagctggtgacctcttctaaaggcctttccacatttctcacatatgtatggcttctcatcagtatgaaactgcccatgttcaacaagatttgagcgcctactaaaagtcttcccacattccttacatttatatggtttttcgccagtatgaactctctgatgaattctaagatgtccaccttgactaaaggccctcccacactcctgacattcatacggcttcccaccagtgtgaattctctcatgttgaacaatgtgtgaggcatatataaaggccttcccacactgcctacattcataggttttctcaccagtatgaaatctctgatgcacagtcagctgataaccacttctaaagttcttcccacattctgtacattcatagggtttctcaccagtatgaaatctttgatgtagagtaagttgatagccactacgaaagttcttcccacactctttgcattcatagggtctctcaatgacatgaaacctgtgatgtagaataagttgataaccactactaaatttcttctgacatttcttacattcatagagtttctctctcttatatatgctctgaagttgtgtagaggatatatctgtttcataagtgggtacttctatgtagctgattatctcacactgtaaatccaaatctgaaacaaaagaggacaacaaaaaaaatttgtatttctataccagagaacaagaaactttatgcaacaaagaaaaaccaacattcataataagtgaatggcatatagaattcaaaaatatggttacgaaatttgaaaaaggccaaaaagagttcagagacgtatgagagtttacgtaagatagtgaaattactgattgaggacataggtaacatttaggtggggccagaatctttgacaagcttgttccaaatctgctatattggcaccgtcaaagaccaagtgaattaaaactgagaggagagaaaccttgacatctttattttgaacctatcactgatttagatgcaggtcagtgtttaagaatacatcctttaagtttctcgagtgatttttcactgttcttaaaataaaatacaaatccctttccaaggactgctgcttacctaggaggtctcatgtcaaaacatcagctctttgcttcctattctctatcatagtccctcttttcaacacctggaatatagtacaattgccccttggtatctgtggaggatcagttccaggacctcctgcagataccaaaacccaacccagataccgacgccttaagtccctgatataaaatggcatagtatttgcacataacctataaacatcttcctgtatactttaaatcatctctggattacttacaatacccaatacaatgtaaatgctatgtgaatagctgttctactgttgcttcgaaaataatggcaagaaaaaagcctgtatgtggtcagtaccctcacaatttaaaaatatatgtttgatctgaagatggttgaatccatgagtgcagaacccatagatacaaagggccaactgtacaacttcccccaacacttaatgctttccacagaccgtttaactgctcaagagtccttggacttagacattttgtaggctgaatccttctcatcctttatgtttcagagtaaatgttctttctttagaaaggcagtacctgctaactctgtctgtctctctatctttatctgtctgtttatctatctatccatccatctagctatcaatcaatcatcaagacagagtcttgctctgtcactcaggctgaagtacaatagcccaatcatagttcactgcagccttgtactcttccagctcaagcgattttcccacctcagcctctcaagtaactgggactacagatgcacaacaccacacctggctaattttaaaattatgtgtagagacagggtctcactgtgttgcttatccaccgtgatcaagttggcttcatccctgggatgcaaggctggttcaacatacgcaaatcgataaacataatctatcacataaaccggaccaaagacaaaaaccacatgattatctcaatagatacagaaaaggcctttgataaaattcaacatcccttcatgtcaaaaactctcaataaactaggtattgatggaacatatctcaataatagctatttatgacaaacccacagctgatatcatattgaatgggcaaaagctggaagcattccctttgaaaaccagtacaagacaaggatgccctctctcaccactcttattcaacacagtactggaagttctggccagggcaatcaggcaagagaaagaaataaaagtattcaaacaggaagagaggaagtcaagttgtctctgtttgcagatgacatgattttatatttagaaaaccccatcatctcaggccaaaaactccttaaactgataagcaacttcagccaagtctcagggtacaaaatcaatgtgaaaaaatcacaagcattcctttacaccaacaatagacaagcagagagccaaatcatgaatgaactcccattcataatcgctacaaagagaatgaaatacgtaggaatacagctaacaagggatgtgaaggacctcttcaaggagaactataaaccactgctcaaggaaataagagaggacacaaataaatggaaaaagattccatcctaatggataggaagaatcaatatcatgaaaatggccatactacccaaagtaaattatagattcaatgctattcccatcaaattaccattgacattcttcacagaattagaaaaaaactgttttaaattttatatggaatcaaagaagaccccgtacagccaagacaatcctaagcaaaaagaacaaagctggaggcatcatgctacctgacttcaaactatactacaaggctacagtaaccaaaacagcatggtactggtaccaaaacagacatataaaccaatggagcagaaaagagacctcagaaataacaccacacatctacaaccatctgatcttcaacaaacctgccacaaacaagcaatggggaaaggatctcctactcagtaaatggtgctgggaaaactgggtagccatatgcagaaaactaaaactagaccccttccttacaccttatgtaacaatcaactcaagatggattaaagacttaactgtaaaacccaaaaccataaaaaccctagaagaaaacctaggcaatgccattcaggacataggcatgggcaaagatttcatgacaaaaatgacaaaaaccattgcagcaaaagccaaaattgacaaatgggatctaattaaaccaaagaccttctgcacaggaaaagaaactatcatcagagtgaacaggcaacctacagaatgggagaaacctacccatctgacaaaggtctaacatccagaatttacaaggaacttaaacaaatttacaagtaaaaaccaaacaacacatcaaaaagtgggcaagggatatgaacagacacttctcaaaagaagacatttggctgcggtggctcatgcctgtaatcccagcactttgggaggccaaggcgggtggatcacgaggtcaggaattcaagaccagcctggccaacatggtgaaaccccatctctactaaaagcacaaaaaaaattagccaggcatggtggcaggtgcctgtaatcccagctactcgggaggctgaggcaggagaatcacttgaacgcgggaggtagaggttgcagtgagccgagatcaagccactgcactccagcctgggtgacagagtgagaatccatctcaaaaaaaaaaaaaaaaaagaagaagaagaagacatttatgaggccaacaaacatatgaagaaaagctcaacatcatcatcagagatcatcagagaaatgcaaatcaaaaccacaatgagataccatctcacaccagttagaatggcgattattaaaaagtcaggaaacaatagatgctggtgaggctgtggagaaataggaatacttttatactgttggtgggaatgtaaattagttcaaccactgtggaagacagtatggcaattcctcaaggatctagaaccagaaatacatttgacccagcaatcccactactgggtatatacccaaagaaatataaatcattctactagaaagacacatgtgcatgtacgtttactgcagcactatttacaatagcaaagacttggagccaacccaaatgcccatcaatgatagactggataaagaaaatgtggtacatatacaccatggaatactatgcagccataaaaagaaatgagatcttgtcctttgcagggacatgcatgaagctggaggccatcattctcagcaaactaacacaggaacagaaaaccaaataccacatgttctcactcataagtgggagttgaacaatgagaactcatggacacagagaagggaataacacaccagggcctgttgggggctgggaggtgaggggagggaacttagaggacaggtcaaaagatgcagcaaaccaccacggcacacgtatacctatgtaacaaacctgcatgttctgcacatgtatccatgtatcctgttttttttttagaagaaaggaaaaaaaaaagactactgatgtcacacagatacaccaaaaaggtatgaaagggtttataactctcatcatgaggctttctagagagcagagcagctcccaagcaggtcataaaacaacttgagagattaggaaaaggaggctggcttggagtttgcatggtggttagggtgtggtgctgggctgagtgttcctgctcatggcatggggttcacatggtttgaatgagaaggagggagcacctaggttttttaccagctggcccagaagtagacagaaggggaaaaaaaaagaggagtcatcagcagttaaacatcaaaaacagagtcagggactggagtggtggctcacgcctataatcccagcactttgggaagccgaagcaggaggatcactcaagcccaggagttcaagaccagcctgggcaacacaataagacctcttctttacaaaaaaaaattaaaaacttggctgggcatggtggcatgcacttgtggtcccagatattcgggagggcaaggtgggagaatttctagagcctaggcggccaaagctgcagtgagctgtgttcacgccactgcactccagcccaggcaacagagcaagaccctatctcaaaaaaaaaaaaaaaagaaaaaaaaaaagaaaaaagaaaaagaaaacacttttttttttgagatggcatctcgctctgtctcctaggttggagtgcagtggtgcgatctcggctcactccaagctctgcctcccaggttcatgccattctcctgcctcagcctcccgagtagctgggactacaggcacccgccaccacgccccgctaaattttttgtatttttagtagagacagggtttcaccatgttagccaggatggtcttgatctcctgacctcgtgatgtgcccactttggcctcccaaagtgctgggattacaggcgtgagccaccgtgcccggccaggaaatacttaaagaaaaaaaatgctctgtcactcaggctggagtgcagtggtgtgatactggctcactgcaacctttgcctctcaggttcaagcaattcttgtgcctcagcttcccgagtagctggggccacaggcacccaccactatgcttggctaatttttttgtatttttggtagagatgaggtttcgccatgttggccaggctggtctcgaactcctggcgccaagtgatttgcttctgtctgcctcagcctcccaaagtgttaggattacagacgtgagccactgcattcagccaagactttaatttttttggggggtgggggtggtaggatggagtctggctctgttgcccaggctggagtgcagtgacacgatctcagctctgcaacctctgcctcccgggttcaacggattctactgcctcagcctctggagtagctgggattataggtgcttgccactacgcccagctaatttttgtatttttagtagagacagggtttcaccatgttggacaggcttatctgaaactcctgaactcaaatgatctgcccgcttcagcctcccaaagtgctgggattacaggcgtgagccaccacacttggcaagattgtaatgttttgaaagcagttttaaccatctctattttctaatgaactataatgtacatagaggatttcttaatgttataaatatttctttataagggttataaataattctgtatttctctattaacatggtatgaaataaagaaagcaaattatccaaagtctgattaaccaaagacaatccaaagtctgagtggaacatttaatcaataaagatccagaacttcatagatacaattcaaatactgcagagctcagttaccttccagtcacacacagattgttcctaaaaactgaccatatactgggctataaagcaagtttcatgtatttcaaaggatcaagattgtatagagtatgtagtctgaccacaagaaaaattttatgctagaaatcaatactgcaaagataactagacaacatatatttggtaattatatactgcttgtaggtaatcaatatactgaacaaacagtgcactgtgatatgataaaataacaaactttggaaaatgatgttttgactgaaaattataaggccatacactaaaggaagtatatacaaacactactcaagtgagtaaacttgatgctcatgggggtacaggttaacaactcagaaatgtgttacacatacactggagttgaatagatacagaaataaatggtggacggggagagccagttttcctgctgtcagggtaaaaagttacatataaacaagacaggaagattagaatacattttgtagtagtagatgagagtcagagacattagtatgaactcatgtttagcttcagatgcatacaaatggatagacaaaaagacaattattaatatatgtaagcatacatcggcgaatgtgcatatatccattacccagaccttgttttttttttgggacggagtcttgctctgtcgcccaggctggagtgcagtggtgcgatcttggctcactgcaacctctgcctcccgagttcaagcgattatcctgcctcagcctcccaagtaactggcattatgtacagacccgcgcctccacgcccagctaatttttgtatttttagtagagacggggtttcaccatgttggccaggctggtcttaaaaactcctgacctcgtgatctgcccgccttggcctcccaaagtgctgggattacaggcgtgagccaccgtgcccagctgaccttggtttttaaatcccattctccactaaaaggaatcacactcctgggagaaacagctgattccaggaccacgggagggagaaaacaaaatgaacctgaaggtagtaccaggaaagaagtcctcaaaaaacagaaggatcagggtattaaatgaacataggaaccaagctaaaagagctatcaatgtctgaagttgaaacggtatgggtggcaaaagaagtaatgtaatatttgattctaccttgaagtataaaacaaatataaatgagtctacactgatatgagaagaaacaaatatgtcttatagaagaattctgtctgaagttgaaacggtatgggtggcaaaagaagtaatgtaatatttgattctaccttgaagtataaaacaaatataaatgagtctacactgatatgagaagaaacaaatatgtcttatagaagaattctatctgaagttgaaacggtatgggtggcaaaagaagtaatgtaatatttgattctaccttgaagtataaaacaaatataaatgagtctacactgatatgagaagaaacaaatatgtcttatagaagaattctagatattaaactctatggaatgtaaagcttaatttccacttctatgtacctgctcccagggtgggctagacttaacaagttgtttctaaagagtagagaatggaaaaggaaaaaatagtacatttggagtgaagaaacctggcagacactactttagccaaatgataaaggttaatatcaccagtgatgtcatgtacccctgatgtaatgtgatgaaaagcatacttcacctctcttacagtctttctttttttttttgagatggagtctcactctgtggcccaagctggtcggctcactgcaaactctgcctcccagattcacgccattctcctgcctcagcctccaagtagctgggactacaggcgcctgacaccatgcccggctatttttttgtatttttagtagagacggggtttcaccgtgttatccaggatggtctcgatctcctgacctcgtgatccacctgcctcggcctcccaaagtgctgggattacaggcatgagccaccgcgcccggctgttacagtctttctaaaaactactacttccagcctaattacaaaaaaacaacagacttggattgggagaacactactggcatggtctgtcaagacagtcaaagtcatgaaaaacaaagaaaagcagaaaaaactgtcacagaacagaagagactggaagataagacaaatgtatacaatgtggtacccctaactggatgcatcttggaacagaaatatgagctatatggaaaaactggtgaaatcccaatggagagtctcatgtcagtttcctagttttgacaaacatactttatgtaagatgttaacaatggtggaaagtgggagagatgtatacaggaaatctctgtattatctttgtaaatctgtaaattttgtaaatctaaaattattctaaagttaaaaagttattttaaaaaaagttaattaccagtggtctttgtttggttggtggagaaaagaaaacaaacaaaaacgatcattacgcactacttctgcaatattcttggcaaaaaatgtttaatcttactctaatcatgaggggaaaccatcaaacctataaatctgacattccacaagaaaactggagtagacacttcaaaaaagccaaacccaaaggggaaaatgtagtaaggtaacaccaagataaaaagcctaagacctggctgggcatggtggctcatgccttaaccccagcactttgggaggccaaggcaggcggatcacaagttcaggaattcgagaccagcctggccaatatggtgaaaccccatctctactaaaaacacaaaaattagccaggcgtggtggcgggcgcctgtagtcccagctaactcggaggctgaggcaggagaatcgcttgaacccaggaggcagaggttgcagtgagccgagatagcaccactgcattccagcctgggcgacagagcaagacttggtctcaaaaaaaaaaaaaaaaaaaaaagcctaagacctaaatgcaatgtatgaatacacaatggatcctggaaacattttataaatgacatttttagaaacagcataacaaatgtaagtatagactctatagtagataagactacattactattataataatattgtgactttgaaggagaatgtctttattcttaggagatgtacatagttaagaggtgaaatttaatgacaactgctacttaccatcaagtgagccaagaagaaaggtgcatatatacagagaaaaagtaaggcaaaatgttaataaccaaagatgaatctatgtgaaaggtaattaactgtatatatattatatattatacattatacacatacacacacatacatatatacacaaatatatatttttaaaatattctcccttggcttgatgatttttaaaataaaaagctggggaaaggaaacagcaacccagaatttaaggagatattacctaaattcccatataaaattatttttaaccaaataatagtaggtttatatccatttatatttgatagcatgaaagaagaaaaaacaatttataaagcagatgtaaatacatatgagaaaaggagaaaacttgaaaattggtgacctatatattcatcacaagaagctggaaaatgcaacaaataaacaaaaataagatataaaagtccagtaattttaaaaaatggagttcacaaataccacagaagagccaaaacggcagatattttatttcaaactaatgttactgatgcaattctctcaacactgatgaagaaaaaagtaaatgctacaatatccaacctaggagtgctaccaggtacctcagctatagctctccacactgcacaaacacagtaagatggcattaggataaaaacatgttactaacttgcttgaaatgcataaaactctaaaaagtagccactgcaaaatcaacacacagaaaacttggacaattctataagcattatgtaatttgcataagtttttaaaaagcacaatggaaactgaagtttcagatttttttttctggagtgtttcttcagacattctaagagggggtaaaagggtacattccctcaacacatgtatgaagctaatgaaacacatccaacattatttttttttaattttttttttttttgagatggagtctccctttgttgcccaggctggggtgcagtggcacgatctcggctcaccacaacctccgcctcctgggttcaagcaattctcctgcctcaatctcctgagtagctgaggctacaggcctgcgccaccatgcctcactaatttttctacttttagtagagacagggtttcaccatgttagccagactgggtcacaaactcctgaccgcaagtgatctgccggcctaggcctcccaaagtgctgggattacaggcatgagccactgcgcccagccatccaacgttaggaaggataatgaaaaacaaaattgcaatccaatcccactcatgaaacctaaagaaaacattaaaagttcagatataattgataagagataaaatatcaacacatgatgaccaaattggagtccagcatgcaaggttagtcaagtactagaattcaacatagtacagaataatggaggaaaaaaatcgtatgaattttgttaatacatgcagaaagaatgattcctaagaaaaattttagcaattgtataaaaaagcaaacctcctccatgtgaaagagtatttatataaattgttaaaaaacataccttagccagacacggaggctcacacctgtaatcccagcactttgggactctgaggcaggagaattacagcagtgagccgagatcacactactgtactccaaccccagatgacagagcaagacccagtctcaaaaaaaaaaaaaaaaagtcaactgcctttttcttgtggaaaatgacaagctgaactaaaattcatatgtgaatatagaagactcagaatagccaaaacaatcttgaaagacaagaattcaagtatcagtactcatactttgtgacttcaaaactttttataatgctacagtaaatcaagcagtatatagtactgtatatagacagtatatatactgtctatagtagtatagtatggtatatatactgtgtatatatacagtatagacagcatatatactgtgtatatatacagtatagacagcatatatactgtgtatatatacagtatagacagcatatatactgtgtatatatacagtatagacagcatatatactgtgtatatatacagtatagacagcatatatactgtgtatatatacagtatagacagcatatatactgtgtatatatacagtatagacagcatatatactgtgtatatatacagtatagacagcatatatactgtgtatatatacagtatagacagcatatatactgtgtatatatacagtatagacagcatatatactgtgtatatatacagtatagacagcatatatactgtgtatatatacagtatagacagcatatatactgtgtatatatacagtatagacagcatatatactgtgtatatatacagtatagacagcatatatactgtgtatatatacagtatagacagcatatatactgtgtatatatacagtatagacagcatatatactgtgtatatatacagtatagacagcatatatactgtgtatatatacagtatagacagcatatatactgtatatagtacatagtaccgtatatatactgtatatagtacatagtaccgtatatatactgtatatagtacatagtaccgtatatactgtatatagtacatagtaccgtatatatactgtatatagtacatagtaccgtatatatactgtatatagtacatagtaccgtatatatactgtatatagtacatagtaccgtatatatactgtatatagtacatagtaccgtatatatactgtatatagtacatagtaccgtatatatactgtatatagtacatagtatcgtatatatactgtatatagtacatagtaccgtatatatactgtatatagtacatagtaccgtatatatactgtatatagtatatagtacagtatatagacagaaagactatgtgtgtatatatatacacatacacttacatatatctcaaatttatgattaattcattatcaaaaagggtgccaacaaaattcaaaggagtctctttagcaatagtgctagcacaactggatattcacatgcaaaagaatgaagctgggcatctatctaccctttgtatcacatatgaaaattaactcaatgtggatcaaagacctaaatgtaagagctaaaactactaacttagaggataacatagaagtaaatcgtcatgaacttggattacaaaagtttcctagacaataatatcaaaagcacagcaacaaaagaaataataggatggaatagaatattattcagccataaaaaaagaatgagtattgatacctcctattatatggatgaaactcaaaaacattatgctaagtgaaagaaagtcattcgcaaaaggccacatgttgcttgattccttttttatatgcagaataagcaaatctatcgatatcaaaggagattaatggttgccagaggctgagagtgagaggatagggaatgactggcaatgtgtatgagctttcttttctctttttttcagagatgaggattttgctctgttccctaggctggagtacagtggcatgatcatggctcactgcagcctcaaccttcagggctcaagccatcctcccatctcagcctcttgagcagctgggacaacaggcacatgccaccgtgcctggctaatttttgtactttttgtagagacaggatcctactatgttgcccaagctggtctcaaacccctgggctcaagcaattctcctgtctcagcattccaaaatgctgggattacaagtatgagccatggcatttgaactgtataatttttgtaaacttttgtctaacattatttcaggctgggtgtggtaactcatgtctgtaatcctaacactttgggacactgaggtgggaggattgcttgagcccaggagttcaagatcagcttgtgccaaaaagcaagaccccgtctctacaaaaaaatttttaaaaaatcagccggggttggggcagggggtgtggcacacatctgtagtatatattttagttatatattagtgtacatctattcatgcaaaattgttatatttcacagtaaaattttattattattttaatttttgtgggtacaatgtaggtgtatatatttatggggtatatgagatattttgatacaggcatacaatgtgtaataatcacttcagggtaaatggaacatccatcacctcaagtatttatcctttgtgctacaaaaaatccaattatattcttttagttattttaaaatatacaattaaattattattgactatagtcactttgttgcgctatcaaatactagatcttatttatcacagtaaatttttttttaaagagaaaacagtagctataaaagacaggcagaagaagtatatttgtaaatggaaatatatggtattcaaaataaaaacagaaagaactggagattattaacattttaagatattactccagaaaagtttctggacattatcagcacatgaattatatattaaaaagccactatgtataccaaggaaaactaactagaatggtccatttaaagcacatactattagagttctatgacttcaaaaaacaaaaaaatttttatagttgccaggcaaaaagatcaagtcactttgaagggaggaaatatccagtgggcattagagttacacttagtgttacttaaactcagaaagtaaaggagcaataggtacgaagttctcaagaaaagtaagatgaattaagaatttgatatccaaagtatctttcaactacaaaaatagccaatagtttaaatatacaagaactctcacaatatatttctcctgatctcatcttggcaggctctttggtcattatcaacagccgggaaatggagaactgggaacatacagcgactacaatgtcagatacataaaagggagtaaaagataaaagtcatgttcctagaaaagttgggagaatgtctaaagaagtaattcatgtaaaaatgctgatttggggacaaacatccatgaatgttgtgtggtcaatttgtataatattccatggaaaagactgtcatttaaagctagcatatcaaataattgaaaagaatggccgggcacggtggctcacgcctgtaatcccagcactttgggaggccgaggtgggtggatcacgaggtcaggaatttaagaccagcctggccaagatggtaaaactctgtctctactaaaaatacaaaaattagccgggtgcagtggcaggtgcctataatcccagctactacggaggctgaggcaggagaatcgcttgaacccggggggcagaggttgcagtgagccaagatcatgtcactgcactccagcctgggtgataaagtgagactccacctcaaaaaaaaaaaaaaaaaatgaaaccagaaagcataatacaaaaagaaccaaaaattgtcatacaataaatgtaaaaatgtgaaagtctctattaaatggcttttgcttgcattccagaaaaaaaatccatttctagatttcatttaaaaaaaaaaagactctaaaatagaatgatgagaaagggtacagaaggcaaagtttaaaaaaaggtatcttaatcttgatatcaaaaaattttgaattaagggaacaaattacaaaatagaccaaatggcactccataatattaaacaatgaaataacaatgaatttaaaagttaggaacagccacacaacataacacctactatcaaatcaattttcaaagaaaaagaattaaaagatttctaaaaataaaaagtaactaattagaggtaaagaataacagtctcaaattaatagaataaatctattttatttattttttttgagacagagtctcgctctgtctcccaggctggagtgcagtggctccatctcagctcactgcaagctccgcctcccgggttcacgccattctcctgcctcagcctcctgagtagctgggactacaggcccctgccaccacgcccggataatttttgtatttttagtagagacagggtttcactgtgttagccaggatggtctcgatctccttacctcgtgatccgcccgcctcggcctcccaaagtgctgggattacaggcgtgagccaccgcacctggcccaatggaataaatctaaataagcactgatgaaatctaattacaatgcttatctctgataataaactttatttcaagtggacaaagaatacttaaaacattgacctcagagcattcatggaaatctaaccacatagagcgccaacaatttgttgagttgacatttcaacaagttcttgaagaattaggaacacagactttaatctctaacaagaacatagtaccattggaaatttatagcagtatcagagagcaatttctattacatgaagtaaaataactctattttaattgacctgaagcaaggggccaaaataaactaaaattataactgtgtaaacattatataactagatagaacagcaaaatctgtgctcaaagcaaaatctatggccttaaatactgaagagatcaaaaaagaatgaaaataagtgagtaattatgactcacaaatttcaaaatcagaaagaaaataaattgatgcaacagaagaggcattggtaaaatcagagcaaaaatgatttactgtatttagaaaaatataaaacaactgcaaaatggttcttcgcaaaaaaaaaaaaaaagttaaatgaggcaatgcagtaagaataaaaggcaaatttcctaatacatgaaataaagaataacatgaggaaattaatcacttttataaaccttgtaagaaaagcccactacttgggctcaaccctgtgctctttcgcttaggttaacacgctaacctgtattatcccaccactgacccttcagggaagcctgcagggaaaacagatgtctggctgtctcctaatgactgatactgtgaaaaggctgttggctcctatctgcgaagtgggcacagagttgttatatctcagtaaactgatccttattttacctaggatcaatgtcggcctaccaacttcctttctcagaataagagatctttagatcacttaattcaaggagatttcgtgggcctgatgccacttaaagaactttactgttgaagggaaattctgccatctccttcttcccccaaacctcttcatgttatgctttatgagggctgaaaaatgttaagaattgtacatacggtttcagaaatagtagattaagatcatgggattaaagcacagaactcctcaacggaggtgcataaaattgcaggcatggtcactcaaaagagagctgctttagatgcaatgctggtctaagggggcaggcttatgtgctgtcttatgggaagaatgttatatcactagaggtctctgtggaatctttaatattactaatattaatgactcagaaaacagagtcgcaataacattaggaaacttgcagaatgctcccacttacctagttataatggctctttgcattcggtaaggaatctgttcttttgttttaatttggcctctgttggctcctgatttaggagactataaactgtgattgcaattcttccctaaatacgtttgttcaaaagtgtgatctccagaataataaaatgctactatatcattttatatatatacaatatataatctcatattatgataaaataataaaatgctactatacagtcatatatatagcaatgctactatatatgttccatcgaatgagccaacaaattatcttccaacaaaaggaatacaaaaatatgaaatgtatggagattagaataaccatgagggaaaacttttaaaaacacaatgataacctcaaacagcactgtacatctgaactagtgttcccacataagtttatcttccatctcaagcagaaggatgaccaaaaatggaaaaatgggggttactgaaaagtgaaaccaacacaatcccctcttaaggccaattgcttactcatcaaggctccaagtatctcacctctcactgcctacccacactaaaattattattgttgttattattattattattatttttgagacagagtctcactctgtcgcccaggctagagtacagtcgcatgatcttggctcactgcgacctccacctcctgggttcaagcaattctcctgcctcagcttcccgagtagctgagactacaggcgcccgccaccgcgcccggctaattttttgtatttttttgtagagacggggtttcaccgtgttagccatgatggtctcgatctcccgacctcgtgatctgcctgcctcagactcccaaagtgctgggattacaggcgtgagctaccgcgcccggcccacactaaaattatgatgtcatagactcagccccatcccaattagttcgctctgttttgcaaaacctgccttaaaaattacttttacactgttggtgggactgtaaactagttcaactactgtggaagacagtgtggcgattcctcagggatctaaaactagaaataccatttgacccagccatcccattactgggtatatacccaaaggaatataaatcatgctgctataaagacacatgcacatgtatgtttattgcggcactactcacaatagcaaagacttggaaccaacccaaatgtccaacaatgatagactggattaagaaaatgtggcacatatataccatggaatactatgcagtcataaaaaatgatgagttcatgtccgttgtagggacatggatgaagctggaaaccatcattctcagcaaactatcgcaaggacaaaaaaaccaaacactgcatattctcactcataggtgggaattaaacaatgagaacacttggacacaggaaggggaacatcacacaccacacaccggggcctgttgtggggtgggggtaggggggagggatagcattaggagatatatctaatgtaaaggatgagttaatgggtgcagcacaccaacatggcacatgtatacatatgtaacaaacctccatgttgtgcacatgtaccctagaacttaaagtataataaaatatatatatatatatatatatatatatatatatatatatatatatatatatatatatatataaaattacccagttgctacttttctgtggagcacgttttttaaaaaaaaaaagaggctggacgcggtggctcacgcctgtaatcccagcactttgggaggcaggggtgggtggatcacctgaggtcaggtgttccagaccagcctggccaacatggtgaaaccccgtctctattaaaaatacaaaaattagccaggcttggtggcacacacctgtaatcccagctacttggaggctgtggcaggagaattgcttgaacctgggaggcggaggttgcagtgagctgagatcgggccactgcactccagcctgtgcgacagagcaagactccatctaaaaaaaaaaaaaaaaggaaaaaaaaaattacccagtctggttctaaaacctgataagtaagtttcctggtttcttattttaagatactactgttactctttcaagaggttgttctcccttttttgcaataaatctaataagcttagctttgctagatgaacagaaatgtctggtaattcttggaagtcaacagtatatagacaccctaggaagtatatgaaaaatatcgttaaatatagaaaaataaatattttgaaatatcataaacatataacaagtaagtccaactcaaaataatacaaagtaccagaataatgaagatatatcaggaaggctgctattttcagacaaaaatcagttgctttctaatatatcaataataactaattataggctgatatatcaatatatctaatatatcaataataactaattataggctcacacctgtattttcagcactttgggaagccaatgcaggaggactgcttgagcccaggagttagagaccagctgagcaacccagtgagacccccatctctaataaacaaacaaacaaacaaaataacgaatcacacaatatagaagtatataattacatattatagaattatgtgttatacaagttcttaatctctgacaagaacatagcaccattagaaatttatagcaatatcagagaacaatttcttttacatcaagtaaaagaactctattttaattgacctgaagtttaactgtaactcaaaagtttataaacatttaataaaatacaaacatagatttagttttaagggtttttaaaaactatcatttttcaaatttctttttaaaaattatagtttagaccaggcgcggtggctcacgcctgtaatcccagaactttgggaggccgaggcaggtggatcacgaggtcaggagattgagaccatcctagctaatacagtgaaaccctgtttctactaaaaatacaaaaaaattagccaggcgtgatggtgggcacctgtagtcccagctactcgggaggctgaggcaggaaaatggcgtgaacccgggaggcggagcttgcagtgagccaagatcgcgccactgcactccagcctgggcaacacagcgagactctgtctcaaaaaataaataaataaataaataaataaaaatgaaaataaaaattatagtttaagttagagtgtagaacttacgttgttggtttctttaccctaatttaataatggcgtatcaaccttcactcgtctttgttcattttcactgcaactggataaatgattagatattactgccagtgtggcaattcctttagtatatgtaaaatttggacaagatgaaatggagaagattatttttctcagcttcagcaataagaaatgcaaacgataaagactgacattgttcacatacatgatttggagttttaagatttgtataaagcatgttctggtgttgcagcttcaaaagaacaggaaaatactccagagtgattggccacattgccacacatacgtacatagctgccagttcaatgagttaagagggcctagcacgaagagggtccacgagcaattaccatacctaagcctagatctggatttctaaatggcgttcccaataaaaggaactggtgctccttacagaagtggctgattccagggctatggcaaagaaaatataagataatcctagattaacaacttgtagtaccagaaaataagaaatgctcaccaaaggtgagcaggttgaaaaggcacagatgccaacttgaaagagttcccaatggccaaagcagaagacaaataactaaggatagtataggattataactcatggaataaaataaacatctatgagtccatattgatataaataattgaataaatagaggaaaaagggagtattccttcttacagaagaattccagctaatgggccaggtgcggtggctcaagcctgtaatcccagcactttgggaggccgcggcgggcagatcacaaggtcaggagttcgagaccagcctgaccaacatggtgaaaccccgtctctactaaaaatacaaaaattagccaggcatggtggtgcatgcctataattccagctactcaggaggctgaggcagaagaatcacttgaacctgggaggcggaggttgtagtgagctgagatcgcgccattgcactccagcctgggcaacagagtaagagtctgtctgaagaaaaaaaaaaaaatgtttccagctaataaatgtaggaggttaatgcaaaatcatcagtaggcaaatgttgcattaaagatgtgtacaagcaggccgggcgcagtggctcacgcctgtaatcccagcactttgggaggctgaggcaggtagatgacctgaggtcaggggctcaagaccagcctggtcaacatggtgaaaacccatctctacaaaaactacaaaaattagctgggggtggtggcacaagcctgtaatcccagctacagcgcctgtaatcccagcctgagcctgggaggcggaggtggcagtgagccaagacagcaccactgcacctgcactctagcctgggtgacaaagtgaggctctgtctcaaaaaggaaaaaaaaagaactggtataagcaaaatctactgttggaagctaaaatctgtggtggggatcagggggtgtaaaagttggaggagaaataggatatctgtattgttttcctgggactcacaaaataataccacaaaatgaagtccgcaaagcatcctcagaagcaaaagttttttctcggaccttctcttgccctcctgtctctcagtcccattctccccctaggctaaccataaagactagaagccctcttccccaaggcaagtcatggaaaccagaaccccttgtccccagagctactcataaaacctaaaaatattactctaactttcccctgcctttttgggtaaaaactggccataaaaaattccctggcctactttgtttgactgttggtcataagacccccattccagagagtgtcccccattccggaaggaaggaatacgtgttctgagaggccaagaagaacctagacagacaggccttgctgggtttccctactcaggctattagcattagatcacaccctttttgcccaatcctgtttctacatagctgtccatactttgttaaacctaagcataaaaataggtaatttcccctgtacctttggatcttctttctaaaggctcctgtgtcatgaaaaagtatgattagatcaatttgtatgccttttcttctcaatctgccttttgtcagtgattttcagtgaaacttcagagggtgaaaaagaagtttttccttggcccggacagatacaattatgaaaagcatctcaaacaagttatatcatattagcattgcctaaggcacaaattcttatttcaccaaattataatattagcattgccagtggaacaaactattattgtctcctcatgtgatacaatgggaagaatagaacatcacctgggggcaatttttcaaaatatgttgggcttgaatttaatcataaggaagtgataatacattgcagattgtagacattctaaaaagaaatcaagtggactggactttgcaaagatgtcaatttcatgaaggaagatgctctgaattaaaggatattaaatagatttggtgagtaagtatgacagatgttccttcagttgatcctagattttaaaatttataaaaggacattactgggataattgggagaaatttggatgtggactgtatatttgataatattcttagagaattgtgaaatcacttgggtaatgtgggcaaagggttaacaaaacattttctaatgttctgtaattaaacattaaacagaatgggaatcccattctgcatgaggatgtactcttaggctaactctccaatgctgcttccctaaaaacagaatgtgtcaactatgttaataagtttcattatttatggtaacaatgaccctgattggcaagttgcacctcggactgtggactaggggctagatgaagagaacaccatatttagggtttctttgactacatttctttttaaaagagcatatccttgaaagaccctggaaacgatgactaaagaatcctcacaccagatattgtaccaacctttggagccagtctttttttttttttttgagaaggagtctcattctgtcaccaaggctggagtgcagtggtgcgatctcggctcactgcaacctccgactccctggttcaagtgattctcctgcctcagcctcctgagtagctgggattacaggcatgcaccaccacacccggctaattttttatgtttttggtagagacagggtttcaccatgttgaacaggctggtctcgaactcctgacctcaagcgatccacctgccttggcctcccaaagtgctgggattacaggcatgagccaccgcgcccagccaaaccagtcttcttaagtcaggggaggcccacactcctgccgtgtggatctcatttcctagcacttgagctctagcacctgtggaaaagagagctcctggaaggctgtctcatatgcatgaatcactgcagccatgccacagggtgctgagcaccaaatacccaagaacaactatagttatatatatatatattataaatatatacttaggttaagagtaaatatcagggccagttaccggggctcaagagtgtaatcccagcactttgggaggccgtggtgggcagatcacttgaggtcaggagttcgagaccaccctttgtattttgtaaaaatacaaaaattagccaggcatggtggcacacacttgtaatcccagctacttgggaggctgaggcaggaagatcgcttgaaaccagaaggcagaggttgcagtgagccaagatccatcactgtactccagcctgggcgacagagtgagactgtctcaaaaaaaacaaaacaaaacaaaaaaaacagagtaaatatcagtcataagggagaaagcatatgatgcaatgactatatatttcataatatgattacagtgaaactaaaaattgggaggagactgggcatactaaaaaactgttttcagtaatcatttaggtagtaaagctgttactaatgttctaagaatgttttatgtgtcataaagaataaaggaaatgactgggcatggtggctcatgcctgtaatcccaacactttgggaggccaaggtgggcaggtcacctgagtttgggagttcaagacaagcctgaccaacatggagaaaccccatctctactaaaaatacaaaattagccgggcatggtaccgcatgcctgtaatctcagatactctggaggctgaggcaggagactcgcttgaacccaggaggcagaggttgcgatgagccaagatcgcaccttttcactccagccagggcgacaagagcgaaactctgcctcaaaaaaaaaaaaaaaaaaatagaataaaggaaatgaatacttgcatggtattttaattttatcatcactggagtattggagaattggtactaaggaataagagatacagatcaaagacagaaaatttcaattaaacaccatttagttctaagtttggccaggaagttgccatataaactcattaggtaatttatttttatgtaaatatgtaaacacatacatatatgtatacttagagtttttttttgttttttttttttgttgtttttttttcttaagacggagtgtcgctctgtcaccaggctggagtgcagtggcccgatctcggctcactgcaacctccatctcccggattcaagcaattctcctgtctcagcctccctagtagctgggactacagaccagtgccaccacgcccagctaatttttgtacttttaatagagacggggtttcaccatgttggccagaatggtctcgatctcttgacctcgtgatctgcccgccttggcctcccaaagtgctggcattacaggcatgagtcacttttttttttttttgagacggtgtctcgctctttcacccaggctggactgcagtggtgctatcttggctcactgcaagctccacctcccgggttcacaccattctcctgcctcagcctcccgagtagctgggactacaggtgcccgccaccacgcccgacaaactttttgtattttttgtagagacggggtttcactgtgttagccaggatggtctcgatctcctgacctcgtgatccgtctgccttggcctccgaaagtgctcagattacaggcatgagccactgtgcccggccttttttttttttttttttttgagacggagtttcactcttgtcgcctaggctggagtgcagtggcatgatctctgttcactgcaacctctgcctcctggattcaagtgattctcctgcatcagcctccccagtagctggaattacaggtagccgccacaatgcctggctaatttttgtatttttagtagagatggcgtttcaccatgttggccaggctggtcttgaactcctgacctcaggctggcctcccaaagtgctgggattacaggcgtgagccaccacacccagtcacttacagatttttctatctttaactggtaaaaagcctataacaatcttcaaccaagaaaaatgggcacttctagaggctagactgtggccttaaaataccatttcccactaaaagaacccaatagttcacaaacttatggctgactaaaggcttggtacaggaaacgtacaagataagcctgcaacactttgtcatatcagatgggagaaggctggcaataaaataaccgtctaaatctgggagtggtggctcatgactgtaatcccagcactttgggaggccgaggcaggcggatcacgggaggtcgggagttcgagaccagcctgaccaacatggagaaaccccatctctactaaaagcacaaaattagctgggtgtggtggcacgtgcctgtaatcccagctactcgggaggctgaagcaggagaatcgcttgaacctgggagacggaggttgcagtgagctgagattgtgccattgcactccagcctgggcaacaagagcaaaactccgtctcaaaaacaaaaacaaaaactgtctagttacctatgaaggatcctaggggccaggcacggtggctcatgtctgtaatcctaacattttgggaagccgagtccggtagatcatctgaggtcaggagtttgagaccagcctggccgacatggcaaaaccctcctctctactaaaaatataaaaattagccgagcatggtggtgcatgcctgtaatcccagctacttgggaggctgaggcaggagaatggcttgaacctgggaggtggaggttgcaatgagccaagatcacaccattgcatttcagcctgggcgacaagagcaaaactccatctcaaaaaaaaaagaaaagagaaaagaccaaatattgatcagcctttattttccaaatggtatcagtagttaccaaatagtaggtgatgtaaaaaattgtttatatttgtacataataaatgaaaaataaatgttagaattagaatatgaccattttggaatgtctgatgaattaatacatccaggcattgagcataaatgactgctaaaaatcacagagagacaaccagaaggtttatgctgagaacctaaaccattcactcccacactcagccttgaaacagagaagtggacctaccaatccccctacaggtagcttactctctccataaacacatcccactgttttcctcagcacaattttactgttctggaagtttcttgcaaaggcaaatggcttcattgttcattactggaagttcctgaaagatccatcaactcttaaatggcaaacatcaacagtttgtactctagaaaattttcaattcctaacctcaaaattctaacctagctgtttccactaattctccactgtggtgtcttcatctttacctaatcctaatcaagtccccgcatgaagaccagccttaaaccaaacttttaattctcagtaaaagccatccttgcccttctgcctctgagatactatataaagctcttcagaggtggtgttttcctttaacacagtaaaccataagcccagctctgtctggtatgaggggagcaggaaaagtgccaacatatgatgcatacaatactgcccaggaagttgtcttgcaataaaataaataaaataaactgaatcaaaatcgattaagtgtaacagtgaaataaatctagcatagctgactccatcttacttctaacctcacaagctaatggcgtttgctcataactgcacgctggccaagttaactatgggagtatttaatttatactataactttaaagcaaggataataatccctttccaaaactattaataattctcaaggagatagggagggtgtacatacaagtaacaacgttatgttaaagatttataggagcattgtgacctgaccgaggacaacgttgtgcaaccttctcggacccctgctgacacccagatatctgtagtcgccagtcacctcctgacctcaacctcctcctagttcccccttcgccaacataaaaaacggcatgagattcattcctttttttttttttgagacggagtctcgctctgtcacccaggctggagtgcagtggcgcgatctcggcaaactgcaagctccgcctctcgggttcacgctcttctcctgcctcagcctcctgagtagctgggactacaggcgcccgccaccacgcccacctaattttttgtattttttttttagtagagacggggtttcgccgttttagccaggatggtctcgatctgctgactttgtgatctgcccgcctcggcctcccaaagtgctgggattacaggcgtgagccaccatgcccggcagagattcatgccttttaagatggttctttaggacattagcctgccatcttctcgctttgctggctctctgaaataaagttccttgccctaacaccttacctcttgacttactggctgttgtgcagtgagcagtataagctctggactcagatacataagcctcttgacccctctacttatttagaggatatagaggggtcagagaacatatttaagcaaatctcagggatggcatcagcaaaaaatagaatggaagatgtttcttcagcaaataaggggttaagaacacaaagaaagatgaagacaaaacttagagacttgcgaaaacttaaaaagacttgaaattggagaaaaaataaaaggaaggaacttattaccattaaaatcagaatagtggttacacttagcaggaggaaggagattgtgactggttgcagacatgtggaggacttcagaatcaactagaaactctctccttgtttagaaatactgcttggagggtataaaataatcttgtatgtcattattataacctttctgtaactctaaaattatattaaaataaaaaaaaatttttaagttttaactcctgacacggctgtggtgacatgattgtttaacttgtaagactcagtaagctactcatgtgttatatgttgttctctgaatctgtctaatgtttttaaaaatgccttgaaaacaattacatcattggttctaatccttcttattcccaaaaattcaaattcaacaatacctcatgtgatctgactacgcctaacaatgtgacctcatttctcgtcactctcctcttaggatctctattctggtctactttggtgctcctcaaactcacatagctctctctattaccctcccttgactatccatactccttccctccaatgcttcagccatctccttagccttctaagctctttattcagcttggaatattcttccccagataaacacatggcttgtgaccttataccatgtctctttccaaatactactgccccaaagaagctgtccccagccatctcatccaaaatggcctaacctctgcttactttctaccattgcttattccactgcctaatagtagttgtttgcctgcttattttattttatttatttatttattttttgagatggagtctctctcagtcgcccaggctggagtgcagtggcgcaatctcagctcacggcaagctccgcctcccgggttcatgccattctcctgcctcagcctcctgagtagctgggactacaggcgcccgccactatgccctgttaatttttttgtatttttagtagagacggggtttcaccgtgttagccaggatggtctcgatctcctgacctcgtgatccacccatctcggcctcccaaagtgctgggattacaggcgtgagccgctgcgcccggcctattttattttatttttgagacagagtcttactctgtcgctcaggctggagtgcaatggcgtgatctcggctcactgcaacctctgccacctgggttcaagcgattctcctgcctcagcctcccaaatagctgggattacaggcacctgccaccatgcctggctaatttttgtattttaagtagagacggggtttcaccattcaagaccggccaggctggtcttgaactcctgacctcctgagccacccaccttggcctctcaaagtgttgggattacaggcatgagccactgcgcccagcctacctgtttatttttatgtgttctttagtacaatgtaaatttccatgaggataaggaccttacatgtcttcctcatgatcactacattgatatgtgtgttgtgtgtgtgtgcaaaaggggagctggaaaaacagttgagtccaaaatacaggtaaaatattgcactaaagaaaaacgaggctgggtgtagtggctcacaactgtaatcccagcattttgggaggctgaggcaggcagatcacgaggtcaggagttcaagaccagcctggccaacatggtgaaaccgtgtctctactaaaaatacaaaaattagctgggcacggtggcacacgcctgtaattccagctactcgggaggctgaggcaggagaatcacctgaacccaggaggtggaggttgcaataagcggagatcaagccactgcactctggcccgggcgacagagcaagactctgtctcggaaaaaaaaaaaaaaaaaaaaaaagaaaagaaaaaagaaagccccatcactgaaaacaggtttgaaatataaaagaaataaggtgattggtaaatggggtaaagttgaagcttcttccatagcttatgctacgatctttattcccaaccaggttgtaggcctttgctccacaagtctgggtgccttggaggaaggtttcacaaacaacacaaaaatgtctcctttctcttaccacatgggctgtggccggccctgatggtgtcccctgccttccttacctgtgaactgtgtttcttccctcaaaatcatccagggctcttttcctcgctccagtaaatcaaccacaactggtttagaaatggaatgtcctccttataagaaaagaaatgccacatggtataaaaataaaaacaaaagtaacagaaacctttgagctttgattaaatttacaatgaactaaggacttcaaataaaagaggggtgagatgattgaagaaatgaaacaggcacagtaaaaccttattttaatgtaaactcatacacgcgtggtctcttaggagaaagtttaacctgtgaccttataaaatgtctctttccaaatattaccaccccaaagtagctgtgaagttctctggagccagaaggctggggcacaaattattcctcttaaatctaccaaccttgtgactttggccatgtgacttcaactcattattccaatttggcaaataaactggacataataatactactattggctaggcatggtggctcacgcctataatcccagcattttggaaggccgaggtgggaggatcacttgagaccaggagtttgagaccaacccgggcaacagagcgagacctcatctctacaaaaaaaaaaaaaaaaaaaaaaaattaggcatggtggtgcatctacagtcccaactactaaggaggctgaggcaggaggatcacttgagcccaggaggttgaggctacagtgagctatgattgcactccagcctaagcaacagagcaagatccagtctcgaaaaaaataaataaataaataagataataacaataacactatcacacagttctttcaggattaagttattttatatatatatatatatatatatatatatatatatatatattccccctcccttccaaagagtggctggggacataatgagcacaactgtaccaattataattattttattatttctgtatgagagaaaaaaagcatcccgactgatatataaaatcttcattcaaactcaatgcaaagctcatgaattataactttcaacaataaatcatacaaattggctacaggaaatgaaatgtggactcttcagtttccaataaatattgttcatctaatccagcactatatgtcacaggggttcttcttatactcagagtaaatcatgaatctgcgtcttttgtccctgcaggtggatcagatgatgacacagcatatctataggaattctggaaatatgcacaatgggaaaccaggattcctgggcaatggttattcatggactaataatatataatttaataataataatatataattttaacccagccccttggatattaaggaaaggaggcaatcataaggggcaggagaatatgtgactatctctaaaggatgaagaaaatgatggtgcttagtggcacagccattgtcaaacaggcagagctgaaatattcctctaagaacaggaaggagaaattcaactatgtcttgaaatatggccttgaaattcattgtgttgaaaggtaacatatcacagatcacattttaaattacttgaggcaaataaacttacccagtgataccaggtttctatagttctccaacatcacatccctgtataagtccctctgattagggtccaggtattcccactcctgccgagagaagtctatggccacatccctgaatgtcactaattcctgaaactgcaaacccatgcattacaaaattttaaaaacattttaaagaaggaaagataggagattacaagagcacattagagaaaaggagtgatatagtatatgtggctaatgactggtagcagactaaagcaacgtgtctacatattcctaaaggatcctattgccacaggatcctattcctaaaggatcctattcctaaaggatcctattgccacagacaaatgtttctgcatgttgaaggttaccacaataattcagacctgctgaggaatggataaaataaaattcaataaagtattaaagacacaactacatagtctgctagtcatgtgatgcataaattcccaataaacatgagtttctaaactatttttcctgtaagttagaaaaatgagatgtccttgccaaatttaataatctccaatatttaattgttttgtgctatttatttatttttttggggacggggtctcactcctgcccaggctggagtgcagtgactcaaacatggctcattgtatccttgacctcccaggcccaggtgattttcccatctcagcctttcaagtagttggtactacaggtgtgcaggacctgcccagctaatttttgtattttttgtagagacagggtttcaccatgttgcccaggctggtttcaaactcctgggctcaagcaatccgcctgcctcagcctcccaaagtgctgggattacaggcgtgagccactgcacctggccaatctccatatttaaaaaaaaaagcttttgcagaacatttagacatttccacaagtctcaagttacatcattatgtcagagcacataagcatttttcttaattttgacaaatatattttttattgactgtgcaacaattttataatgaatatttcagacttactccgtcgttaatccatcttttacctcgtgtacattttttaaatcttttttttttttttgagacaggctcactctgttgcccaggctggagtgcagtgacacaatcactgctcactgcagccttgacctcccacgctcaagcaatcctcctgccatagcctcccgagtaactgggactacaggggcaagtcaccatgcccagatgatttttgtactttttttgtagagatgggtgtctcactttttttgcaaggggtctcaaactcctggcctcaagtgatcctcccgccttggcctcccacagtgctgggattacaggtatgagccaccgtagctagcctaccttcatatactttgttggacagaacttcaaaggtcttccccagttctggaaatcaacatatttactccttaggataatattctcattcatcgccattttccatcacttaatacttttcttgttccagaatggatactgatataggatgactcataataaaaaaatgtcacccaagttcagcagaacacattcaaccacaaaataaaaacttgtctctcagtaattctttgacaagatccatggtatatctccaacaattctaaaattctcaaagaatatgagatctcatcacatactaagacagaccaattgataaccaaatcccatcttatttgcctagaaaactcaggtctgcggagaatgtcagagcctacctatggtatccaaataggaccaacatctctaattcaccaaactaaggacctataaaggaagctcaaatagttccctgttgagacttcactcctttactgctctatcatagactttggttgaacaataagcacatgagtactaaatacatttgacaataaatataaaagtggacagaaaatactcatagggagaaaactgagttatttgctatcactattcacaatattagaagaaagtggggacagataactgaaggaggccttcttaaataggaagccttaggttaatgaaaacatccacataacctatgatcatgatattgcaaggaaacagaattaatcaacttacacaggtcatggttttagaattgtaagacctgatcagtcctacttggtggggttccaatactggaaacattcaaactccagagaatccagagctgagagaagaaaagagatgttagtgttcccaatatgacttaatttaataaaatctttctgctcctctatttctccttccaaattaatccctcacaactgaacatataacttagggaaaaacagacaatgaatctaagcactccctcacaccccaggaaacccagctatacaaaggtagttttagagtaagtcaatggctcactaaagccagatccagacaagatagcaagaggttttctggacaaggctccaatttgggaaggctgatctagacttgagattaggctgctcagtttctccatgagaagattcacttgccttcattcccaccttccaaggctgagagaggacttatcgttcaaactagaagcttctttttttttttttttttttttttttttctgagatggagactcgctctgttgcccaggctggagtgcagtggtgagatcttggctcgctgcaacctctgccacccaggttcaagcgattctcctgtctcagccacccaagtagctgggactacaggtgcgtaccaccacacctagctaattttttttgtatttttagtagagacggggtttcactatgttggcggggctggtcttgaactcctggcctcaggtgattcacccgccttggcctcccaaactagtcagattacaggcatgtgctaccgcgcctggcctcaaactagaacctcttctatggcatcagaatcagttgaaattggtcaaaacatgagagagaacacatcacaggaggaaatgtttaggcctggttctgtgttgagcacaaactgccttgctaaatacaaaatatacatgtaatagaataccaagaagctatcagatgctaagtagggaaacgtatttaataaaatttaaaaatttcagatatactgtcaacggaaaattaagatgagaaaacagaatgtacaatatcattggatcgttaaaaagacagacaagcattgaggcacaggctataggacatcaatacattgagaaagtctggtagtttatttattctgttacattacaacatgatcatatgttaccattacttttcttttagttgctatcttgattttcttttttgaatatatttcataatcattttaacactgttcatacattaacttaaaaaatacatgtgtacacacacacatacactcacacacaaatttgtatattaaaaggtgggtttattttgccacttagccacagtgtcatccagtctactgctaaactctctctcttttttttttttttttttaaggggcagggggtcttgctctgtcacccaggctggagtacagtggtgtgatcatagctcactgcaaactcaggcttctgggttcaagtaatcctactgcctcagcctcctgagtggctgggactaaaggtgtgcaccaccatgcctggctaatttaaaaaaatttttttagagacagggtcttactatgttacctaggctggtctcaaactcctgggctcaagagatcctccctcctaggcctcccaaagtgttgggattacaggcatgagctaccacgcctggcctagtttcactttttatctaacatcacttgaagaaaaaattagacagtaaaagcttacagaatatattcactaacttccatatagattccatgagcttagttacaatgatgaccagaatctaatcaatgccacgtccacatgaattcccaaggcacatcacctgaatctctctagtggtcttcactatacactgacttacccgttcctatttacaacttatggcccttgctgaattattggcattttaaagtagtgactagtcctagccacagcaaccagacaagagaaagaaaaaaaggcatccaaattgattaagaggaagtcaaacttgctgttcgccgatgatataatcatatacctagaaaaccctaaagacttacccaaaaagcccctagatctgacaaataaattcagtaaagtttcaagatacaaaattaatgtacacaaatcagtagcattgctatataccaacatcggctaagctgagaatcaaatcaagaactcaacctcttttacaacagctgcaaaaaaaaaaaaaaaaccacaaaagaaaacaaaaacaaaacaaaacaaaacaaaaacaaacaaacttaggaatatacctaatcaaggaggtgaaagatctctacaaggaaaactacaaaacactgctgaaggaaatcatagatgacacaaacagatggaagcacatcccccgctcatggataggtagaatcagtatggcgaaaatgaccatactgccaaaagcgatctataaattcaatgcaatttccatcaaaataccatcaccattcttcacagaattagaaaaaacaatcctaaaatgcatatggaacaaaaaaagagcccgcatggtcaaagcaagactaagcaaaaagaacaaatctggagacataacattccctgacttcaaactatactacaagacaatcgttaccaaaacagcatgggactggtataaaaacaggcatgtagaccaatggaagagaatagagaacccagaataaagccaaatacttacagccaactgatcttcgacaaagtaaacaaaaacataaagtggggaaaagacacactattcaaaaaatggtactgggataattggcaagccacgtgtagaagaatgaaactggagcttcatctctcaccttagagaaaaatcaactcaagatggatcaaagacttaaatctaagacctgaaaccataaaaattctagaagataacattggaaaaactcttctacacattggcttaggcaaagagttcatgaccaagaacccaaaagcaaatgcaacacaagtaaagataaatagatgggacttaattaaactaaaaagcttctgcacagcaaaagaaataatcagcagagtaaacagacaacccacaggataggaaaaagtattcacaaactgtacatccaacagaggactgacatccagaatctacaaggaactcaaacaaatcagcaagaaaaaaacaaataatcccatcaaaaagtaggctaaggatatgaatagacaattctcaaaagaagatatacaaatggtcaacaaacatatgaaaaaatgctcaacatcactaatgatcaggaaaatgccaataaaaatcacaatgtgataccaatttgctccctaagaatgaccataattttaaaaaatcaaaagataatagatgttgccatggttgtggtgaagagagaacacttctacactactggtgggaacaaaaactagtacaaccactatgacaaacagtatgaagattccttaaaaaactaaaagtagaactaccatttgatccagcaatcccactaatgggtatctacccagaggaaaagaagtcattatataaaattattttatttttttttcagtgatagagacaggagtctcaccatgttggccaggctggtctcgaactcctggccttaagtgatctgctggcctcagcctcccaaaatgctgggattacaggtgtgagccactgcacccagacagaagtaattatatgaaaaagacacttgcacacacgtttatagcagcacaattgcaaaaatatggcaacagcctaaatgcccatcaacaagtggataaagaaaatttggtgtacgtacacatatatatacactatggaatactactcagccataaaaaggaatgaaataacagcattggatgcaacctgaatggagttggagaccattattctaagtgaagtaactcaggaatggaaaaccaaacattacatgttctcatttatgagtggaagctaagctatgaggatgcaaagacataataatgatataatggatctcaggaggctgaggcaggggaattgcttgaactcaggaggcagaggttgcagtgaaccgagactgcgccactgcactccagcctggccatagagcaagcctttgtcataaaaaaaaaaaaaaaagccggtcgtggtggctcatgcttgtaatcccagcactttgggaggccgaggcgggcagatcacgaggtcaggagactgagaccacggtgaaacccagtctctaataaaaatacaaaaaattagccgggcgtggtggcgggcgcctgtagtcccagctactcggagaggctgaggcaggagaatggcctgaacccgggaggcagagcttgcaagtgagccgagatcgcaccactgcactccagcctgggcgacagagcgagactctgtctcaaaaaaaaaaaaaaaaaaaaagtaatatttaagaggtggtctcttgaagtaactaatacaaattctgttgttagtcttttaggatatgactttcagatttaagctctgatacttaataaaatgtgtcttaaagtctcattggtaaattgggagaaaatgtcatttagcatataaaatagtctgaagatgaagtaaaataatccacataaggctgggtgcggtggctcacgcctgtaatcccagcactttgggaggccgaggcgggtggatcatgaggtcaggagttcgagaccagcctggccaagatggtgggattacaagcatgcaccatcacgccagactaatttttgtatttttagtagtgatggggtttcgtcatgttggccaggctggtctcgaactcctgacctcaagtgatccgtccgccttggcctcctaaaatggtgcgattacaggcgtgagccaccacacccggccaaatatgagaacgttaatgagattcagctcaatggctcccaacatctactggaaagaaagcagattggtattaggacattcagacacatttcagatgaagtaaaacatactctaaaaccagtaaccttaggaaagaaaaaagccaactagcctaaacattgagttttagatgtgaaagaatttttttcctcctcattagagtccttttgaggaatagcaggaccagggagggagaaaaaaatcatgagttatcaggcctttccttgaagcacggaatgcctccttacacaataccctccacgccttccctgttcacacactttaacacatggaggtaggagagaggctggaatctgggtatgagttcacagcaggttcctggggtcagagctctgggaaagacgaggttctgagacaggtagctcgctctcagagctcacaaagaaataacctcccaggcgtttccaatctcacagcaagtcaatgccttcttgctggaaaacttgatgtagagttcagtatccaacttccctcttgcagacattttttgtgtgtgtcagccgcaagcagctgtgaggagggaggagagaagcagcagccgggaacctacagccaagactcaaagtgacaccgcagtgccaccgcaatcaacgtacatgaaaaggacaagcacctcatatccccgtcacgcaagcacagccactcactcacctgtcacagcctcacaaccgcacccaccgtcaaggaggcacatcccagcctctcacacgcagtttctctgtcacacactctcaaacattccccatctgacatatacaacattctctcacgtgcgcactcaaataccctcctctgctgttcatgcacccacgggcctgagattccgataacaactggccgtccacactagaggcttccacggttaaagggcttcctccaccaccccggctggtttaggttgggctccaacgtaacttgattgcccagagccctccctgcgagtactctgtgcctgttatatactgaaatgagttcaacccaccttgcaaaagaaccacgcgaaaacggaagggaagccatagattgggtgttcccgttgccctctgggaaatgtagtttaagcctaaagctccatgaccgcggtggcttgtgggaaaagtggctcggaaccccaaatcccggttagattgcaggcaccgccggacgctggctcccggaggttttagttttccctctaccaggagtgtgaagacacagagacttattgcgctggcgaagatggctgaggcgaaggcgtgtccgacttgtcctcggagttctgagggtttcagtgaccccagaaggctgagaagtggaatccgaactcgaggctgcccgaagcctcgggctgtttgagtgtagagccggtaggggagggctttcaaagtgtggccgcgagggcgagcgtgggggatcggttatgagctcccgagggcggggactctgctctgtgtcccctgaggaagtccagtcttgttataaggtatgagaaaagtaactttttaaaaatggacaaataataattgtatgttttatatactgatagggtacaatatgctgttttgatctatgtttacaatgcgaaatgattaaatcaagctaattaaatccatcacctcacttttttgtggtgaaaacatttaaaatctacttttagcaattttgaaacatgcaacacattatttatgtagttgctattctatgcaatcgattaacaaagtttatttctcctgactaactgaaattttgtactgttttaattaacatctcccttttccccatttttcagtctctggtaaacaccattctttgcctcttaagagttagacttttttagattccacaaataccacttatgtggtatttggtatttatctttctgttactggcttctctcacttagcataatgtcctcctggtttatccatgttgtcacagatgacagaattttccttgttttatttttattttttatttattttttaaaaatctatttacttattattattttttgaaacggagtttcgctcttgtcacccaggctggagtgcagtggcacagtctcagctcactgcaacctctgcctcccctgttcaagcgattcttgtgtctcagcctcccaagtagctgggattataggcatgcgccaccacgtcggctaatttttgtatttttagcagtgacagggtttcaccatgttgatctggctggtctcgaactcctgacctcaggtgatccacccaccttggcctcacaaaatgctgcatttacaggcgcgagccactgtgcccggccgattttcctcttcttaaaaagtgaatagtattcctttatatatacatatatatatgtgtataaggttatatacataatatatataatatgtaacattttctttatccacttataacatgctggacacctaggttgcttccgtatccaatgcagaataatgctgcagtgaatggtagtgcagttatctcttcagcatgctgatttcaattcctttagctatacacccaccggtggggttgctggaacatatagtaattctatttttagtttctgatgaatctccatattattttccatcatggctgtattaatttacattgggaaatgtacgtacttttgatgttgttgtgaatggactggtttattcaataaattgtgttaggtacattgactaatagtgtgtagaagtaaagttatatttacttaattcttaaaggtatagtcaaaacagactgaataattaaatgtaaaaatgatctggagaaaacctttttttttttttttgagatggagtctcgctctgttgcccaggctggagtgcagtggcgcgatctcggctcactgcaatctctgtctcccgggttcaagtgcttctcctgcctcccgggttcaagtgcttctcctgcctcagcctcccaagtagctgggattacaggcatgtgccaccacacctggctaattgtatatgttttaaaaaattaacttaggaatagattttctaagctaaattgaagggaaatgctaaggaaatagtgagattttacttgataattatgtgtctgaatgaatcagccaattaataaaattaaaacagacctcgggccatggtgcatgcctgtcatcccagtactttgtgaggccaagacagagatcgcttgagtccaggagtttgagcccagcctgagcaacacatcaaaacgctgtctctacaaaaaaatacaaaaattagccaggcggggtggctcatgcctgtagtccccactacttgggaggctgaggcaggaggatcacctgagcctggagaagtcgaggctgcagtgagctgtgatcgtgtcactgcacttctagcctgggcgacagagtgagaccctgttccagagaaactaaaataaagtgaaatgaaaacaaatacaagacaaaaattgatcgacttattttaacacatagtatgatgagagacatagataacagtactaacccggtgtgtttctgttgatcaaagtcacggtcactagtctaaaggaaataggaatagtgactataaattcacaaccatttacaacattagaaatactaattatcttcagatatatcagactcacaattacttgcccttttaagaattcatcctgttctccataaggaagaaagtattgataactctttttttcccttaacttagcactttgtgcttctgaatctctgaatttgtgttcacatcttaacacttttttttttttgcaattattttctgtagctttttgtcttcagttgagacatctcctatattctctttacacttttccacaaatgacccaatttttttgtaagcatcattgatgagttccatgtatgtgatgacggtgtaatgataaattatcaatgtggtttccctccagtcttgttcattattcaagtgactctccttggctgagcaacaggccaggaggtatctatgacattttgttcaggttaagcagtaagaataaaacaaaatcgacattatctttttcatattttaaacacaagccaacaaataatttggaaggacccatgattagacaatgaggattttatgctccctcaagagtaattgagattgtttaattgtatggaggaatgaacatatcttaaagggaagcaagaagatataatatttagatcacagaatcattaggaagcggctttgcaccctggctacaccactgtacacaggaaatatcagggcaccgtggcgcacgcctgtaatcccagcactttgggaggctgaggcaggtggatcacctgaggtcaggagtttaagaccagcctgactaacatggtgaaaccccatctctactaaatacaaaaaaatagccgggtgtgttggcgcacgcctgtaactccagctactcgggaggctgaggcaggagaatcgcttgaacctgggaggcagaggttgcagtgagctgagatggcgccattgcactccagcctgggcaacaagagcgaaactctgtctcaaaaaaaaaaaaaaaatcactgccacaaactttttcacataggacgatgaaggattccagagccccttctacctctaggggctcctaccgctgccatcctacccctgccgtaccacacatatatcttgacagggcctgttacagagaagaaaaggtccagtaaattaatactacagtcattgacacataaccaccaaaaaactcaaattaaaattttgacaaaattaagtgtcagcaagaatgcaaagatttgggaattatcagacattgtaagactgtcagttggtgtgttaacattgggatgaagccaataatacctagtaaaactgaagatatgtttaccatgtaacctatggttttacctcttgctttatactgtacataaatacacactaatggtaaccaaatagaaatacaaaaatgttcacaacggcatcatttgtaactgaaaaaatgaacacaacccacatgtccaccaaccatgaagggatacacactggtgtactgttttttgtttgtttgtttgttttttgagacacagtctcactctgttgcccaggctggagtgcagtggcacgatctgggctcactgcaacctccacgtcccaggttcaagtgattctcctgcctcagcctgccgagtagctgggattaccggtgtgcaccactactttcggctaacttttggttttttgtttctttgtttgctttgagacggagtctcactgtgtcgcccaggctggagtgcaatggtgtgatcttggctcgctgcaacctctgcctcccgggttcaagcgattctcctgcctcagcctcccgagtacctgggactataggtgcgtgccaccacacctggctaattttttgtatttttaatagagacagggtttcactgtgttagccaggatggtcttgatctcctgacctcatgatccgcctgcctcagcctcccaaagtgctgggattacaggcatgagccaccacacctagctggtgtactgttttaatggaatgcagaatcgatgctaaatgtgaatattaaatacttaatattgagtaatagaagccagatgcagcaggatacagactattactccaattatgtaagagagaaaccaggcaaaatcagactatactttaggcatataaaaaatacataataaggctgggattcatgctaaatgagtagattttagcttcccttgccacacgcaaacaatgtgggtatctgtgagatgatagagatgttaatttgcttcactatagtaacccctttatactatgtatatgtatcctataacatcatgttgtgtaccttaaatatatagaataaaatacatttaaaaaaagaaaaagttttggctgggtgtggtggcccatgcctgtaatcccagcactttgggaggctgaggcatgaggattgcttgagcccaggagttcaggaacagcctgggcaacatagtgagaccccatcgctatcaaaaaagaaaaagaggccaggcgtgatggctcatgcctataatcccagcacttcaagaggccgaggcaggcggatcacgaggtcaggtgttcgagaccagcctggccaacatggtgaaacctcatctttactgaagatacaaaaaattagccagggatggtggcgcacatctgtaataccagctatttgggaggctgaggcaggagaactgcttgaacccaggaagcagtggttgcagtgagccgagattgcgtcattgcaccccagcctgggcaacagggcaagactccgtctcgaaaaaagaaaaaagaaaaagaaaacaaaattatgaaaagatgcacaacaaaattaaaatgttgactctaaagagctactgaatgacgggggtgcatgagagaaaaggttacttaacatttttatacctattgaattgaatcctatgtatgcattataaatttaaatgtgcaataatgcagataactgaaatgtgggtatgctttgattaggactttgcatttcccatttgctcaacttccttatgattctagatgcatatgaatagaaatacaaaatttaaggagccacaggactcttatagccctttcttctttccatattttgtgtctctggctgtagtttgccatatgtgtccctatggctaatgagcaaaatatttttcagttggatacctgtgaccaagcattgcaagttaaagatatttctgaatcttggaccctcttagttacagtaaagcccggccatgcataataaagcagagaggaatgtaaaaggttgctgcatcgataatcaatttctggtgagcaataattataggtaatgtaaaatgagacaattattgcttttcatcatatcttgaaagaactcctacagtcattgattttgaacaaaacaccaaagttcactctcctcttttctataatgaaaagacattatccagtagaagttcaagagtaaaatctgaaggcagcttatctgacctggccacatggccttgccacttattcaacataactttctacacactaacctctccagacctcagatcttcaactctctgaaatacaaacatagtagtatctacctctagaactgcagctgaactgagcattttagggaaggaacaaacacacatgatatagatagtcagattatgaacccagcgtagcccagaatacagaaatttctcagtaatagagaccctcaggagaaaaatcagatgtagcctatctcagtggtctttcatgtggcaaatgaaaagtgaaagtccataatgagaaagacatgggcagccaatgataccatcgattcagtgtagactctcaacatatctgacagtcattgcctgttgtaccccaacccgtttatattttgggtttatatcacctttcagttaaaacatacataaacctgaagcctcagtcagaaatatttatggataaccaggtattattctgtgtttccagtcaaaactcaggtagaccacattttatgtgacaggagaaggcacagttgatgcccaattaaccctaagatcatctctgcctgcagcttcctatcatcacagcaagctcttttcctgcagtccatcatctgtgtctgccctttgctatataggtagcaaaaataggcatctgaaaagatgctcaacaccatatgtcactagggaattcaaattaaaacaacgatgagataccactacacatgtattagactggctcaaatccaaacgctaacaccaccaaatgctggtgaggatatggagcaacaggaactctcattgattgctgctgggaatgcaaaatggtacagccactgtggaaggcagttttgcaaattcctgcaaaactaaacatatgcttaccatatgatctggcaattgcattctttggtatatgcccaaatgacttgaaaacatatctactcaaatcctccacatgaatgtttacagcagcttatacataaccaacaaagattggaagtaaccaagatatcctacaatagggaaatgcataaactaactctgaaacaatcatacaatggaatattattcaggaataaaaaaaaatgaactaccaaggcatggaaagacatggaggaatcttaaacacgtatttctaaatgaagccaatgcaaaagggccacatagtgtagagttccaattatatggaatactagaaaaggcaaaactaggcagatggtataaaaagttcagtggttgccagaggcttgagcagagggaaggatgaataggtggagcacagaagatttttagggttctgaaacttttctgtgtgaccctatgatggtggacatatgtccttatgcatttgtcaaagcccataaatggtacaacacaaagagtgaatcttaatataagccgtgaacttaataatatccatattggctcatcaaggataacaaatgtaccatactaacaagatgataatagaggaagtgtgtgtactatggtgtgagggggatattagagctcaatatgccctctgctctgttttctgtacacctacaactgttctaaaaattaagtcaattatttatctatcttttgcagacaaggtctcgctctgtcactcaggctggagtgcagtggtacaatcacggctcactgcagccccaacctccagggctcaagcaatcctccccacctcagcctcctgagtagctgggaccaccagcgtgtgccaccatgcacggcacatttcgtaggcatctgaaaagatgctcaacaccatatgtcactagggaattcaaattaaatttatgatgagataccattacacatctattagactggcttgaatccaaacaccaacaacaccaaatgctggtgaacatacggagcgacaggaattctcatctattgctgctgggaatgcaaaatggtacagccactgtggaaggcagttttgcaagttcctgccagactaaacataagcttaccatactatccggcaaaaaaaaataaaaatttaaaatatgttttatatacttaacaatatataaagaaatatatattttctatatattttaaaaataattgttttaaattttttgtagagacagggtctccctatgttgcccagcctgcagaatctattaatttaaaaaacgttttaaactcttgaacaaggaattatttgaagagtgaaaaataaaatgatagaatattgattgataaattccaaatgttgaatattaaataatttggattaattttaaattccgaaaagcaaaactttaaaaaatatttttaaaatgtcctaatcccatgtcaatgcatgttcaacaaattcaagagccaatttcagagaagaaataagtggtcaacaacaagttcttaggttttgactttatttgttgactatttgtatttgtgaatggcgaagtttagattttgtttctttcttcttagggtattgactaataattttattaagccagagagacagtaaatagaattattatctatttgtccattttatctgttataaatatttcttccaaactcacttatctaaagttttcgggttttttagctggcgcagtggctcatgcctgtaatcccagcactttaggaggctgaggcaggaggatcacttgaggtcagcagttcaagaccagcctgggcaacatggaaaaactctgtacctactaaacatacaaaaattagccgggctgccaggcacagtggctcatacctgtaatcccagcaatttgggaggccgaggcaggcagatcacctgaggtcgggagttagagaccagcctgaccaacatggagcaacctggtctctgctaaaaatacaaaatttttggccgggcgcggtggctcacgcctgtgatcccagcactttgggaggccgaggcgggcggatcacgaggtgaggagatcaagaccatcctggttaacacagtgaaaccccgtctctactaaaaatacaaaaaattagctgggcatgatggcgggcgcctgtagttccagctactcgggaggctgaggcaagagaatggcctgaacctgggaggcggagcttgcagttagcggagattgcgccactgcactccagcctgggctacagagcgagactcggtctcaaaaaaaaaaaaaaaaaaaaaaaaaaaattatccaggcgtggtggcgcatgcctgtaatcccagctacttgggaggcagaggcaggagaatagcttgaaccccggaggcagaggttgcggtaaactgagattgcgccattgcactccagcctgggaagcaagagcgcaactctgtctcaaaaaaaaaaaaaaaaaaaaaaaagccgggcacggtggcgcatgcctgtagtcccagctactcgggaggctgaggcaggagaatcccttgagcccaggaggcggaggttgcatgagctgagatcgcaccactgcacttcagcctgggaagtaaaaaggtttttttcgttttgttttgtttaaactgttttttttttttaccattcagatatatggaatgtttatagatatctaccaagataaataattaccatatcaaggttctaaattttaaaaaatattttttccctttgttacgtttaggaagcctattccaggccgggggctgtggctcacgcctacaatacctgcattttgggaggctgaggccgggggatgatgaggtcaagagatcaagactatcgtggtcaacatggtgaaaccccgtctctactaaaaatacaaaaattagctgggcgtggtggcgcgcgcctgtagtcccagctactcgggaggctgaggctggagaatggcttgaaccagggagtcgcaggttgcagtgagccgagatcacgccactgcaccctagcctggcgacagagggagactccgtgtcaaaaaaaaaaaaaaaaaaaaaaaagaagaagaagaagaagaagatggccgggtgcggtggctcacgcctgtaatcctagcactttgggaggccgaggtgggcggatcatgaggtcaggagatcgagaccatcctgcctaacatgatgaaaccctgtctctactaaaaataccagaaaaaaaaaaaaaattagccaggcgtggtggcgggcgcctgtaatcccagctactcgggaggctgaggcagaagaatggcgtgaacccgggaggcagaacccgggaggcagaggttgcagtgagctgagatcgcgccactgcactccagcctgggcaacaaagcgagactccataaaaaaaaaaaaaatcctattccaggccagccgggcacggtggctcacgcctgtaatcccagcactttcggaggccgaggtgggcggatcacctgaggtcaggagttcgagaccagcctggccaacatggtgaaaccccatctctactaaaaatacaaaaattagccaggtgtggtggcggatgcctgtaatcccggctacttggaaggctgaagcacgagaatcacttgaactcgggaggcagaggttgcagtgagccgagatcgcgccattgcactccagcctgtggaacagagtgagactccgtccctaaaacaaacaaacaagcaaacaagcctattccaaaacaaaaataatgaaagtatttatttctttggatgtttttaaataaaatttttaatcatatgtattcgtgtccaaaggtgaagaacataatgtattgaagaatgtggtgggacttaagtcactcctataggacctgagtccatttacctaacccttttcttttacccgagtcaggttccacccagactcgcctcctactggcgctgagaacgcagcgactccacccttagcctcaggtcgggggccccagcatttgtctgatctgcgcttgcgtactcctaggccaggtggccactcccagaggtgtcccaggctcgcgcggtgggcggggcgcgcggtcctcgtggtcacatccgtatttcctgtaggtttttaggactctggactccacttctcagggttgcctgcggtcctgactgttccgtcttggactacatattccacgggcgacggagaaatcttgtacctctggctccgtctcctggacctctgcgctgcccgtgacctggtcccacctgaggaagaaggcggcgcgggtcgctgccggagcttctgcagccccagcccgcagcccgcgcgggaccctgggtggcggtgagagtggagctgcaggaggcactcagagcgcggaggcctcgggcgcgggccggacttgtctcccacctactcaggccttggggtgctggagctgcgaaggaaggggctcatctctagggagacaggtggagaacgtctcctttgtgacgtggagactgagaagggtgcgtgaatgtgttgtgtgaccgggacatagcgtgagtgtcctttgaaagcgtgctttgctataactctgtggtgtcactgacccgtgggtcagggtctcagtttccctgtctcctctcagcctcgtatgactgccacagagaaatgatctaagcgcaaaatcagatactgagccttagatgaagttttccagtgagaagaaacggataggatgggaagcttagagcaggaattcccttaagacggtgtgatagactcttttaaagaaaaaatattcagtctttaacactcgttaaagcatgcaaaggaagactttattcaggatcatcgtgataggtattggaagcacagcagtgagattttgcaatgggtacaagagattgggttcaactccaaattcagcatgaacgagtaggaatttatagtcaaggagcaggttagggatcactggatgacaaaatactaagaggaaatgtctgggataagtaggattctggctaaacgcacctgttgggattctttctgaagagagagacctggatgataagacatcatcgcctgggggatagtggaggatgaagatggggggcagagggttcttgctaaactgacttaaaaggggcctttgttattgttggattttataatgaagtgtacagatgggcccaggggaaggtgtaagagcctgagtaaagtttggtcacgcagggtttgtgtaggattccttcctggaagggttgtacactccgcccccatctcccggttcttggagtttcatttacgtgtttaagaatcacgtggatggtgaaccctgattctgaagtcggtgtctgctgtgttcatggcaggattcggttaggaggaacagcacagcatgctgggctctggatttaaagctgagcacttaagagtgaatttgagattagtcataaatcgccttgaactattggaggaaaaaaaaaaaaaacagaactggcccagaaagcaaggaaggagattgctgactatctggctgctgggaaagatgaacgagctcggatccgtgtggagcacattatccgggaagactacttcgtggaggccatggagatcctggagctgtactgtgatctgctgctggctcggtttggccttatccagtctatgaaggaactagattctggtctggctgaatctgtgtctacattgatctgggctgctcctcgactccagtcagaagtggctgagttgaaaatagttgctgatcagctctgtgccaagtatagcaagtaatatggcaagctatgtaggaccaaccagattggaactgtgaatgacaggctaatgcacaatctgagtgtggaagccccatccaaaatcctggtggagagatacctgattgaaattgcgaagaattacaatgtaccctatgaacctgactctgtggtcatggcagaagctccttctggggtagagacagatcttattgatgttggattcacagatgatgtgaagaaaggaggccctggaagaggagggggtggtgggttcacagcaccagttggtggacctgatggaatggtgccaatgcccatgcctatgcccatgctatctgcaaatactcctttctcatatccactgccaaagggaccatcagatttcaatggactgccaatggggacttaccaggcctttcccaatatttatccatctcagataccagcaactcccccatcatatgaatctgtagatgacattaatgctgataagaatatctcttctgcacagattgttggtcctggacccaagccagaagcctctgcaaagcttccttcctgacctgcggataactatgacaactttgtcctaccagagttgccatctgtgccagacacactaccaactgcatttgctggtgccagcacctcagcatctgaagacattgactttgatgatctttcccagaggtttgaagagctgaaaaagaaaatataggtctcttaaaccaggcaactttcatattctgggagttgagactgagcaatttctccttgtaacaaagaatctccatgaaattccttttcatctgttaaccgtcactgagcacaacactcctcctctgggctctctgcctgctcctccagattctgctgctttccagttctctgttgatcctgagactaacaaccggagactgaggctggagcaactggctcctggcagctgtgcttgtcccttttctgtcagagtgatcccaggtttcctcctggcccgtcccatggtccctccacaggagcataagaggatgggaaagcactatggggagaccaccaaagatggctggacagtgggagagagcacgtcgtgaagcatcccagcctcgtgttgaggttccagacttagaaacaaacccctctgtacagggggattgtggtgagtgagaatcaaggccacggtgtgtgttttcgcactcgaatgcaagtgggagagagaaaatgactcaggacgccattgtaacggttcctggaagctgggccctctcattggcatatacactactcctcgccgcagggcactgtcccaccgggatccagttgcaaagtttgtctcgacagtttaaggcctcgcttagttgtactggattctcagggagtcctctgtggccttttgctctgagtgctgtttcccttgtaccagagggcagcaccatggaaattctgtttttcctgtagcatattgtgttggattgccttactggcagagaaaggacaaattgccattgaagtctagggtgggcttccagctgccttaatagaagtactcaagtcttttgggtagtgagctggaaagcctacaggaaaaaaggggtacctgttttcatttgaaaactttgattcatggaaactttaaaactaatctcagataaatttttggtgcaaatgtggctgtagttgtccactgctttcctggatggatgggactcttatgtcataacttctatactcctttggcccatagctaaggtcatccttccccacaggggtggctttgggattggattatacagcttttgcttctgtgtagtatacctgtacatacctgtttcaggaagcctttctttaatgttttcagttggtttgtattctgtagctcagtagctgctaataaagttaaagatcctggaaaaaaaaaaaaagaatcacggccttcttgaattctgactctaagaacctgcagtgaaggatgactagagatttcacctaccatacttccttctggttatgtgtatgaaattatgcacctgtagccttggagggggaaacagaaacactatttcgaggagtttttggatcgttccgttttggatttctgtagatcaaaagcaataggaatatgaactcagttgtgatgtgttcgtgcaaatgaaggaagtgagccggaaatttaagtgccccaaaataggaattcttagtcattgggtccattgtctgtttttacgggcatacagggcaccacaatccccctgaaactttatatacatgtttgttaatttgcatttttccagggttccatcttccaaattatttagacttgagctttagacctggaatcagagtgttatacctttgaatggttttgcagaaaactaatgatcaagattatgagaatggttaagaaaatcatacaacatccatgggattggacattatactgataataaaatttatgtttataaagaatttgttattagctgcataccagatatcagggaaacaaaaaataataagaatttgtcattaacggaaaaatgactgtgatctaaccttaaacagtattcacagttgtagatcacagttctcaaaaactgtatatgcatcccattttttaaaaatggaagtttccaaaaccttttgcaaggattgtatctaatatgaccattcaattggtttttcagagaagaatagaaggggagaggccacatttattgaacatctaatgtgtacccaaatcatgtggtctgttttctgtatcttttctcatttaatgcgcaaagaccatttccctgttcattaagggaagaatcttaatagtgaaatgtttctaattatgtagaagtggcacagctaaaggctattcaagaggacacatgttacatgacacgttgatactttttaattctagtcctagtacttaggtttcttttcatgacaaaaatgtaccctcttctaaaaagtttaatgctttggaatgtattgatgttctatttgtaatgatggaattaaggcaggctcattgcaaaaatttcattacctaaggaagttatgaagaagaaagaataaccccaaatcccccctgcccagagaaaatcactttacatattttggtgtatgtgtttctaattttcatgtatgaacatttgtgtgtagttttgtcattgcagaagagaattaatagagacacaaagactccaactgttagttcgaaaatggaatctacctcaattgttgctgttaaaccaaaattatggtatggtattgctttggactgagcttctgcactaggctccaacagaccacaccaaaccaaaatgaagtcactcatgctaaatgccacattatcaaactgaaactttaagggagcagataaatctcaaaaaaaacctgtttttcctgaaaacaagagattccagtctaaataattgatgttcaccactcctttcttatttttaatttaaaaaacttttttttaaagacagggtctcactctgtcacccaggttagaatgcagtggagtggttatggctcactgcagcttcaaactcccgggctcaagcgttcctcccgcctcagcctcccaagtagctgggactacagacgtccgtcaccaggcctcagttcttttttctctagttctgttatttgttcccaccttacacaaaacccactgcattgggcaagggctctcattctattttatacaatggaggctgccccgtttgtgaatcccaaataaaagcccatgagatctaaagtcaatttattgtaactttgtcttttgacgtgggtttccatatatctgtgtatcttaggaggatagggaagtaccagggaccacctgaggtgaaaaacaactacgtatttacgccttttagatactaaaaacatcatttaacactcaagacgtcacaaattatgaagtaagatatcctctcagaattaataatttatgctgggctcatgtctgtaaaatcccagcactttgggaggctgaggtgggtagatcgcttgagcccaggagtttgagaccagcctgggcaacatggtgaaaccctgtctctacaaaaaatacaaaaattagctgggcatgggagcgcttgcctatagaacccatataggctgcggggttccgctctccaggagaacgactctcgggtgagagagcagcccacaggcacacaggcagacctgtcctcgaggtcatggagggcatgacttttggggagactcacccgaacaccgtccgggcaggcctgaggctgggatgccacgctgctcctcccggattctgcctgtggtttcatcatcctggtcctaactccgccactcatggcatccggagaccatcccatcaacaccctggagaggtcaagccagagcctcagggtcctcacacccaagcaccggaacggagggctcctgcattgccaagcctcagggactagtttctcaggcaactgtgggactgtactcacttgagcccaggagtctcaggctgcagtgagctgcgacagcaccactgcactcaagcctgggcaacagagtgagcccctgtctcagaaaaaaaagttaaaaatgttcaaaaggtactgagtggtcagaaaaacagaataaatgcctcctatcttgtatctttttgttttgttttttgagatagagtcttgctctgtcgcccattctggagttccatggcatgatctcggctcactgcaacttctgcctcccaggttcaagcgattctcctgcctcagtctctcgagcagcttggattacaggtgtgctccaccacgcccagctaatcattgtatttgtagtggagacggggtttcaccatgttggtcaggctggtctcgaactcctgacctcatgattcgcctgcctcggcctcccaaagtgctgggattacaggcatgagccattgcacccggcccttatcttgtatcttttgacatctcatcattaacatacacctttcttccacaattaaatttagcatcatcatctacaacaaaatgttcctgccccatatactgccactactccactaacataaatgcaaagttcttccaagtgtcataagttcctgtgaccattttcaaagccacgatttatggggaatatcagttattgctctttgtataaataaacaaaggccaaccaaataagaacaaagaggctgggcatagtggctcatgcctgtaatcccagcactttgggaggccgaggcgggtggatcacctgaggtcaggagttcaagatcagcctggccaacatagtgaaaccctatctgtactaaaaatacaaaaattagccgtgcatgaaggtgcacgcctataatcccaactacttggaaagctagggcagaaggagaatcatttgaacctgggagatggaggttgcagtgagcctagatcgtgccactgtgctgtagcctgggccacagattgagactccgtctcaaaaaaaaaaaaaaaagaataaagacaggcttatgcatatagaacttgctacgtagtaagagttctgtttacatttaagttccatttgtttatgttctctgtagattgtggatattaggcctttgttggatacatagttcgtgagtatcttctcccattctgtaggttgtctgtttgctctgttggtagtttgtcttgttgtgttaaagcttttagtttaattaggtatcacttgtctatttttgtctttgctgcttttttggaaactcagccaaaaattccttgccaaggcccgtgttgagaagagtatttcctaggttgtcttccaggatttttatagtttgatgtcttgtatttaaatctttaatccattttgagttaatttttgtatatggtgaaaggtaaggggcccagcttgaatcttctgcatatggctagccagttatcccagcaccatttattgaatagggagtcctttccccattgctcatttttgttgactttgtcgaagatcagatggttgtaggtgtgtggctttatttctgggttctctaacctgttcctttggtctatgtgtctgtttttgtaccagtaccatgctgttttggttactgtagtcttgtagtatagtttgaagctgcatatgtgatgcctatcagcagtggactgaataaagaaaatgtggtacatatacaccacggaatactacacaggcgtaaaaaaaataaatcatgtcctttgcagcaacatgaatgcagctggaggccattatcctaaacgaattaatgcagcatcaggaaaccaaataccctatgttctcacttataagtgggagctaaacattgagtacacatggacacagagatgggaacaacagacactgaggcctgcttgagtgggaagggtggcatgaggctatggatcaaaaaactattgggtactgtggtcactacctgggtgatgatatcatttgtacaccaaaccccagtgatatgcaatttacccatataacaagcctgcacatgtatccgttaaacctaaaaatagaaaaaattaaaaataaataaataaatgaggtataagtctaattgctgaacgttgtgaaatgtaaccaacagagccattgaaaatagagtggccaggcatggtggttaatgaatgtaatcccagcactttgggaggccgaggtgggtggatcacgaggccaggagttcaagaccagcctggccaagatggtgaaaccccatctctactaaaaatacaaaaattagcgggcatggtggcaggcacccgtaatcccagctactcgggaggctgaggcaggagaatcacttgaacccgggaggtggaggttgcagtgagccaagatcgcactctagcctcggtgacagagcaagactccgtcgaaaggaagaaagagagagagagggaaagaaaaagaaaggaaaggaaaggaagaaggaaaggaaggaaagaaagaaaaaaaagagtgagagtaccgtatttggaaagtggtccaggcactggggtgagtgtcagccaagtcatcacctgtgagaacaggaagtcatcaggtaatatatcaagttgatatattgagaaggagcaggatctacctattatataacacagagataatcactcagatatatagattagaaatagtttagaaaatttaaacatttgattattcagggagtagacctgggagcattggagaaataaggtgggggagtagactgcatggaaagctctttcttagtgtatgatttttcaatgatgcacataggtttcttacataacatgtaaaattcaattaaagaagaaacaaagttgtgttctggggtcccaaaggttcagtgattaattagaagaactcacaaaactgagtcaagctgttatactcatggttatagtttattacaacaaaaaggtacagattaaaatcagcagcagaaaaaggtgcatagggcagagttgaggagagaccaagcgcaagcttccagttgtcctctcccagcggcatcatgtggacagtgcttaattcacccagcgatatgtggcagaaagtacagaaaatactccccaacaaaaagcttacctgagccttggtgttgagggttttactggaggttggtcacatggacaagagcacccatttggatgaccttagtttctctgtctccacccttcccaaggtcaagctgacactgcatggtccaaggtccccacaataaatcacattgttaacatggactatataggcaggatattccaaggagttagaggttattttccaggagctgggctagagtcaaacctttctttggagtgtgcggggtttggacaattcaggcctactaagtttccttgactgcacacaagtgatagtgagtatgtaggaaatgagtagtctcatatattgctggtgaaagtatagtgttatataaacctccggaaagaaatcgagtgtgtagtgcgtagacattttatttggtttgtttttgtttttgtctgagacaggtctcactctgtcacttgagctggagtgcactggcgtgatcacaactcactgcagccttgaccacccaggctccagctatccccccacctcagtatcctgagtagctgggtccacaggcacgtgccaccacacccagctaatttttgtgttttttgtacagagggggtttcatcgtgttgcccaggctggtctcaaactcccgggttcaaggaatcccccacctcagctccccaaagtgctaggaatacaggagtgagccactgcgcccaacctgttattttttttgtataaattaaattgtatatgttaggctcggcacggtggctcacgcctgtaattctagcacttttggaggccaaggtgggtgaatcacttgaggtcaggagttcgcgaccagcctggccaacatggtgaaaacccatctccactaaaaagacaaagttagctggacacggtggcagatgcctgtaatcccagctactcgggaggctgaggcaggagaatcgcatgaacccgagaggcgggggttgcagtgagctgagatagcgccactgcacttcagcctgggagacagagcgaaactccatctcaaaaaacaaaaaattgtatatgttattgtatgtatgtgtatatattaaattgtatatacatatatattacattatatacgcatacgtttgtttcctcgtgcaatctgtttcagcagaagtaaaatctcataaagatagaagtaaaagaatatttacagaagcattatttttggttgcaaaagtactttaatatcttaaatgcttatataatggaagataactcttaacaaagaattagttaactttttatctactataaaggtatcttaatatctttatacctgaagtgatatttgtggcaaattgttatatttcaaaaggagaatgctttataattaaagaaaaaagaaagaaacgttatatagtaggcctcccttatctgcaggagacgtgctctaagaccctgtacccagaggctgcagctccagccgccctgtcaagccagcctgccaagctgctcctgctccaaaccagccatgtctccaccaatgctgtgtggcccaaagtttttttatgagaaatctactgatcatcttattgagcatcccttgaatgtgatgagttggtttcttctctcttgctgctttcaggaatctctctgccttggctttcaacagtttgatgtgtcttggaatggatgtctttgagttcatcttaattggagttcattaagcatcttggatgtttacattcatatctttcatcaaatttgggaagttttaggcattaattttaggcattaatttttgaaataatctctctggtcctttctcttttcctactgaaatttctacagagcatatgctggtctgcttgatggtttttgtactttgaatgagcctttcttatttatttgtgtgccttgtgattgttgttgttgttgaaagctagatatttgactccaataatatagtaactctggaaatcaggttcttccttttttggtgtttgtgaatttttttgttttttgatcattgtaggctccctgtgtcatggattacccggagatgtaagcttaaagtcttctcagatcttcttgaagcctgcatccttttctgggcatgcaccgtgactctctaaattccccggtgtgtctggtttttaataaaatctcctaggtcagtagtccccaatctttttggcaccagggactggtttttggaagatagtttttccatgggcccggggagggggtggggtgatatcaggatgagtcaagtgtgtcaaatttattgtgtactttatttctattattattacatagtaatatataatgaaataattattaaactcaccataatgtagaatcagtgggcaccctgagcttgttttcccataactagatggtcccatctgggggtgatgggaaacagtgacagatcatcaggcattagattctcataaggagtgcataacctagaccccccacatgcacagttcacagtagggttcatgctcctatgagaatctaatgccaccgctgatcagacaggaagcagagctcaggcggtcatgtgaacaatggagagcagctggaaatacagatgaagcttcacttgctcgcccgctgctcacctcctgctgtgtggtccagttcctaacaggccacagaccagtactatgggttggggaccccatcctagagtttgaatgtctggcccccagaagggaaaaaagagaaaaacaaagaggaaagaagggaattggatctttaaatcacctggaagtagcttcagctggagcaagaggggcttggaatactggagcagaagggtgcagcaatggcagactgctaatctgtctgcactgccaagatcagaaatagcaatgagaaatcagatacccaagttttggaggacaggttccttgctgcccaccctggctcccttaagctgccagatatgcatggctgcttgccccatggctgggggatgagttgctgcctggagctgaaattagcagaaattaaccacagtttgccatccatgcctttccctggaagttacaagctttgaatatattcaggttccaaaatggtcacataaggtagattctgccagtacaattgttgtctaggtgggatgacacattcctagtgcttcctgctctaccatcttttagaaccctctgtccatataactgtattttagagttctttatatcatatctaatagatgagattatcaattttctcttaattctaccatacaacatttactttttctggtcaaggaaacaaagtgtttttcttatttcttttagatttggattcgaggtatgaaataatcaactacgggaacatgtacatttatagaaaacattcatttcttactctccatcagataattcaatatggagagaaaccctatgaatgtaagcaatgtggaaggcctttggtcgtcatacagaccttagagtacatcaagtaattcacactggtgagaaaccctgtgattgccaggaatgtgggaaggcctgtgattgccaggaatgtgggaagtcatcatacagaccttagaatccacaaaagaattcacactggtgagaaaccctatcaatgtgaagactgtgggacaacctttagtcgtcttacagaccttagagtacatcagagaattcatactggtgagaaaccctatgaatgtgaagaatgtgggaaggccttcagtcgtgccacaaaccttgctcaacatggaagagttcatactggtgagaaatcctatgtgtgtcatgaatgtgggaaggcctttagtgaagttggaagacttaggaaacatcagagaattcatactggtgagaaaccctatgaatgtaaggaatgtgggaaggccttcagtcaagcctcaaacctggcacaacatgacagaattcatactggtgaaaaaccctacaaatgtaaagaatgtgggaacgcctttagtcacacgtcacatcttgttagacgtgaaagaattcatactggtgagaaaccccgtgaatgtaaagagtgtgggaaagcttttaggagtaaccatcaacttactatacatcatagatttcatactggggagaaaccctatgaatgtaaggagtgtgggaaggcttttagtgtgtatggacgactgagtcagcatgagagtattcacagtggtgagagaccctttcaatgtaacaaatgtggaaagtcctttaggctcagttcaagtctcaaagtacatcagagcatgcatactggtgagaaaccctttgaatgtgacaaatgtgggaagtcctttaggtttagttcaatccttcaagtatatcacagaattcataccagtgaaatactttatggcatatacatataatagacaatgcacagtatatgaatgaattataccactgagaaacagttgaatgaagaaaatgtgagaaggcttttatgcatggatcagtttttacaggacgtaaaataatctatactggtatgaactcttttggaatataaatatttgaagtttttaatttatgactcaagtgttcagagtatttatgttgtattttataaaagaaagtattttatggcattcctctatgtttcactgttcaatctgtggccagactgtgcagccaaggttaaaaggcaggtaagtgccacccagggaagagactggtacatggtttgaggttgtggaagacagactacaagcacaccaggctcaagtggttcagcatttacttaaagctagagaggagaaagagtgcataagatcgtgccgcttgcaatgtgtcagtccccctagccagcagttccactgtgcagctgatatggaagacactagcaactgcacacaccccactttgtgctgcagtgacaggacttcatcccttccccgcctcgggtctgaaatacataatgctgggaatgtgcttcaaggccactgacagatgtgcttaagcagaacaaaagagtatacaataagtccaaaacagggaaatacagtcccacacaagtcaataatcccagcacaggctatgagggcttttgaatctcatggtagggaagtgttccaggcccaaggctcagtcttatgtggccatgtgagggctgaaagactgcatgacggcctttcccaacactatttatggattctcagaatatttatactaaaggaatattaagagaacacacaaaaccttgtttatttgttttatgtataaaagctttccagcacaaatcattattaaacttgagtaaattcatatcacagaaaacctctgctaatgtaacagacagacgtaggaaagcgtttagcctttgtatgatcttaaccattctaattgtctttccactccttgttttttctcattcgtatatggcaatactaataatatctacattatagtggctgttagaactaaatcagttcatttatgtggaaaacatgggaaagtttttgacataatagttcatgttcgataaacattagcgactgtttctaataccatttatgttttgagatgaaactcttatgggtctaagaatttaggaacatttcatgtaactgcttaccccttttttaatgtgaattttttctttctgaactactctaatagaatgtaaaaaacctgagagcatcttcattctgaggtcttaaggtgaatcaaacacttaatccttgaatgaaatttatatttatacttttagaaagtgtaaaaaaatgttaaattagccaatgatttacattccacttccacatttcaaaattgattagaaattggccaaaggatatctattttgccatttcccccaaatttatgaaaaattagaaacataaagaaaagctgaaaaacagtacagcaaatatatgttaatattatgtcatatgacctttctgttttgtatattttgctgcatcattggacagttgtaaacatcatgatgtttcagttttaaatatatcaaaatgaatcccccaaagagacagatttctttttttttgctttttttttttaggcggagttttgctcttgttgcccaggctggagtgcaatggcacgatctcggctcacggcaacctctgcctcccgggttcaagcgattctcctgcctcagcctcctgagtagctgagattacaggcatgagccaccatgcctggctaaatttgtatttttagtagagacggggttttgccatgttggtcaggctcgtcttgaactcccaactttaggtgatccacctgcctcagcctcccaaagtgctgggattacaggtatgagccaccgtgcccggccaagagacagatttctaattacataagaaaaataataattttggccgggtgcggtggctcaagcctgtaatcccagcactttgggatgccaaggcaggcagatcacgaggtcaggagatagagaccatcctggctaacacggtgaaaccccgtctctactaaaaatacaaaaaattagctgggtgtggcggcgggcgcctgtagtcccagctacttgggaggctgaggcaggagaatggcgtgaacccgggaggcggagctcgcagcaagccgagatcgcgccactgcactccagcctgggcaacagagcgagactctgtctcaaaaataataataataataatttcatattctaatgcctaacctgtattcaaattttgaaaatttatccaagttatatctttttggtcattttcaaactggtatttgctctagtttatgcctttatgataaagcgttactcacttttaatttagaatagtggctggaaaactatggcctacaggctaattgcaacctgccagtggattttgtagttttattgcaacactaccacattcacttgtttacatgttttcttcttactaccacgtcagagatgtcattgcaatgagaccatttgcaatggtcacaaaacctactgtatataatatcatgacctttctagagaacatttgccaactcatttagaacaatatctctactgttttttttttttcatgagtttggctttttgaagaccacaggaaagttgtctaatagaatgctgaacattctgggttgttttgtgtgtgtgtggttttgttttttcgtttgagacagggtctcgctctgtcacccaggatggagcgccatggtgcaatcacagctaactgcagccttgacctcctggacttaagcaatcctcccacctcagcctcccaaataactgggaccacaggtgtgtgccaccatacctggttaactttatttttttgtggagacagggtctctctatgttgcccatgctggtctggaactactgggctcaggggatcttcccacctcagcctcccaaagtggattacaggcatgagccatcacacccaactgtggattttaaaaattgtttcattgtgaagtcttatttttctttatcttagtcctcatagttctagtatatttgaagttaaaccaagaggtttactaggttatgattaagaattttcagcaagaatatgtcacagatgatgtgcacactaaaaagcgtataatgtttgattttttccaggactaaggatgctaagtgtcatcacttggttatagtggtgattgcttgatctctccagaatagagccccattataaagagccattttacagttattaatctcagggatattgtgtcacatccttttagaaatctataatccttttagaaatctaaaagcaacatccttttagaaatctttagaaatctataatttagaaatctataattaattaaatccttaattaaatatggaattaaaaatggaaatcagggcctcttcagaaagtaataataattaaaggcctgtatattagaacatggggatattgccagacctttttgggaatttaatacccttcaatgcacacaggaaacgaagagtaaaggccagaatttgtgttcaccactctatccccagaacccattcaatacctgttaatgagctggcgttgataaacttgataaaccctaagccaatacaaagcaacagttaatacaacagaagaattagagcctagtgattagtaaacaaaatagtaccgtttcaaacagttttgttcccaccagtgaaaagcaatgaatgcgtctacaagtacatttttattgattgagaagtgaaccattatcttgaacaaaggtgtgccactggtctccaggaccactcaggctcaatgatttgctggaaggactcctgggatccagaagagctgccatactcaaactcaaggcgaaggatgcaggcaacaatgaacaatgggagaaggcactggacaaagtccaggagagacgaggcacaagcttccagttttccccttccattagaattgcatggcaacagcacttaattcttcccaccatggtgtgtgccagcatgtgcaaagtagtgccaaacaggtaatctcgtctgaatgctggtgtccatggtgcctgggtgactgaacttaactcctgaatttactcagtctccagccttccagaagtcaagctcatatagcatgggccttgggcacacaaaatagccattcatcataagtcacattttttgcataaactttgtggtgacagtgatacagcataggaagcacgatagtccaagtactcagagattatctcccaggggccagtgaagggccagtcctcctgaacacaggcttttcattggaatgtataagggttgaacaccacaggcctgctgaggtaaccctttcctgcacagtcaggcagttttgggcattcttatttcagagaacctgattactaaagtacccatgtaataaatgatagatagggaaaaatcttaaggatataaaaaatatttcagaaatattatttttgaaaaaaatcaggttacaagccacatgtagaacatgatattatttgtaaaacatacacatatttcaatataggattcaggccattatatataactagactgaaaaagtctagaatatcatacacccgtatattaacagcgtttatctttttgttttgatcttggggtattttggttaaatatatcataatttttggtcagttgccatgccttacttgaaatatatgtatgtaaacttttgtgtgtgtgttttaagcggaaacctacactctcaaaagcagaacgttcactttttaaaaccatctcggctgggcgcggtggctcacgcctgtaatcccagcactttgggaggccgaggcgggcggatcacgaggtcaggagatcgagaccatcctggctaacacggtgaaaccccatctccactaaaaatacaaaaaattagccgggtgaggtggcaggcgcctgtagtcccagctactcgggaggctgaggcaggaaaatggcgtgaaccctggggagcggagcttgcagtgagccgagatcgcatcactgcactccagcctgggcaacagagcaagactccatctcaaaaaaaaaaaataaaaataaaaataaaaaataaaaaataaaaaataaaaccatctctacttgatcttacagaaaaacaataaatttggattgtttttgctgaattacttgtgtttccttcagtttcctcatagctgaacctcctctaagatttctgtcacatcacctgaatctggatagtggtccttaatacattgattcctagtcagagtttattttactagaataaaagacaccttagcaactatgtcattttagtctaccacctcaaatgctatgattgcaaggtctgttacactataagcacttatacctgtaggcaaattatacttctaggaattcgcttaaggaaatgcaattacgcctcacttagcaacagggatacactctgagaaatgtgtggttaggcaattttgtcactgtgcagacatcacagaatgtacttaaacctttggtatagccgattacacacacatccaggctacatggtatagcctattgctcctaggctacaaacctatacggcatgttactgtagtgaataccgtagccaactgtaacacaatggtatttgtgtgtctaaacatatctaaacagagaaaaggatcagtagaaatatagtatatagccaagtgtgctggtgcacacctgcaatcccagccactctggaggattgcttgagccaggagttcaagttcaggctgggcaacataatgagatcccatctcaaaaaacaaaacagaaaaacacagcctgggtgtggtggctcatgcctgtaatcccagcactttgggaagctgaggcaggggggttgcttgaatgcgggagttcaggaccagcctaggtgacatggcaaaaccccatttctacaaaaaacagaaaaattaaccgggcctggtggcaggcgcccatggtcccagctactcaggaggctgaggtgggagggtcacttgagcccgggaggcagaggctgcagtgggccgagattgtgcccctgcactccagcctgggcaacagagcgagactctgtctcaagagaaaaaaaaaaaaaaagatagtataaaagataaaaaatggtacacctatgtagggcacttatcatgaatgaagcttacaggactggaagttgctctaagtgagccattcagtggtgagtgaacgtgaagacctaaaatatttctatacactactgcagacttcatgtaaacactgtacacttgggctacactaaatttatacaataatgtttttctccaataagaatcttagcctactataacttgcaacttaatttttactttttgacttttgtaataagacagattaaaacacacattatacagctgtataaaaatattttcttttaagtccttattcatatacctttttctatttttaaatctttttttgctttttgaacttttttggtaaaagctgagacacaaacacacaccttatcctaggactgtgtcaggatcatcaatatcactgacttccagctccacatcgcgtcccatggaaggtcttcagtggcaataacacacacagagctgtcatcgtctataacaatgcctctggaatccctcctgaaggacatgcctgaggctattttacacttaactttttcttgtaaattgcaggactacactctaaaataatgataaagagtatagtaaacacataagccagtaacatagttatttattatcaaagtattatatatgtacagtacatattatcaaagtaactatatacttttatacaactggcagcacagtatgttttacaccagcatcaccacaaatgtgatgaatgcattgtgctacgatgttataacagctaccacatcactaggcaacaggaatttttcaggtccattataatcttatgggaccactgccatatatgtgatctgttgttcattgaaacattatagcctatgactgcactagtaaaaatacataaaatgcatgtacaatgatgttcaaaatgtatttttgataaccaaacatttaaaacaaaaatctaacagcaacacattaattacttcggctctgctatatgacaacaaatacaattttttttgttttgttttttgttttttttagatggagtctcactctgtagcccaagctggagtgcagtggcatgatttcggctcactgcaacctgtgcctctggggctcaagtgattctcctgccttagcctcccaagtagctgggactacaggtgcgtgccaccatacccggttaatttttttgtatttttagtagagacgaggttttaccatgttgccctgggtggtcttgaactcctgagctccagtgatccatctgccttggcctcccaaagtgctgggattacaggcgtgagccactgtgtctgtctcaacattgttaatcatattgattttaacctagactaacaaagaaacatatgcaagaagaatcaccgaggaaggcaggtttaaaataataaatttccagctgggcagggtgactgacatctgtaatcctgccactttgtgaggccaaggtgggaggactgcttgagctcaggggttcaataccagccgaggcaatgtagtgagaccctgtctctacaaaaaatgaaaaaattagccagatgtggtggtgcatgcttatgatcccagctactcaggaggctgaggtgggaggactgattgagcccaggagacagagactgcagtgagccgtgactgtgccactgaactccatccagcctgagtgatcaagcaagaccttgtctcagaaaaataaaaatagaaatgatgacaaaatatatttccataatttgaaaattttatgctgttcaaattcagaataatcgggttgtcacagagctcatagagttcatgacatctgttctgtcctaagcagggctggagtcaccccaaaagtggcagcagggaagttctcagaaggaattccatcccaagatggagccagctgggatcctaaagacagaagcactgaaagtccgggcaatcagtgcaaagtgtttactaggggaatttaaatatacagggccgcggcctgagagggataacgagaagagagatgtgccacccatgtaatgtccttaatgaagggattgggtcatggagtttacatgacagttaaaatatttggcccaggatctagtatacgtgtttagcaacatggttaatctttcagtgcatcaagcaacaacctaaaactaaatcagttcttaggaatgtgcaaggccctggtttgggtttaggctcaagctgaaaacatgcagctggtcaggtcatagtggtcaaagcattctgtttcttggtcagaacaaagaaagtgggggcagccagagtctcctacttttttttttttttgagacggagtcttgctctatcacccaggctggagtgcagtggcgccatctcggctcactgcaacctctgcctcccaagttcaagtgattctcctgcctcagcctcccaagtagctgggactacaggcgcctcccaccacgcccagctaacttttttgtatttttagtagagacggggtttcactgtgttagccaggatggtctccatctcctgacctcgtgatccacccacctcggccacccaaagtgctgggaatacaggcgtgagccaccacgcccgtggtgccacctggcactttttctgttgttgtttttttgagacggagtttcactcttgttgcccattcccaggctggagtgcaatggcgcaatctcggctcaccgcaacctccgcctcccgggttcaagttattctcctgcctcagccttctgagtagctgggactacaggcacctaccaccacgtccagctaatttttgtatttttagtagagacagggttttgccatgttggccaggctggtcttgaactcctgacctcaagtgatccacctgcctcagcctcccaaagtgctgggattataggtgtgagccaccacacccagccaaaatattcacattggtttttactgtacaaaggtattatggatgatgtctctcctttatgtttatttccaatttttctcagatattattaatttttataaggaaattactaaagaacaaggatttcttgtcaggtcctgtttttctcttatattgtaagacctaaaatttcatctgttatcttaacacctttgagcctcaccgggtcccaaaggcctaaccatgagtttccctgctctcatcagatatgccccctacccagcaagaaaggctcccagccagttagttccttcgaaggccagaccagctatatcccacctggtcctcaagctaatggagttcatctccctgccagcccatgaaaccaatgaagcaagataatctcattctcccatggaaaccagggggcgcctcatcctcttactattataaaacctgcctctcacagcccctgctgaggtagtctacttccaagtgcaatcttcctgcagaggtgctaactttctttctttgggatatgcatttttatgtgattaataagctgctgtcaatctcatctgtccagtttccaggtgtcatgtgtcagatacctccagaaccatagggcaagactctgtcaccacaagggaaaagaggtgggcaaaacactttccaattcttttttttttttgagatggagtttcactctgttgcccaggctggagtgccaccctgttacccaggctggagtgcagtggcacgatcttggctcactgcaacctctgcctcctgggttcaagtgattctcccgactcagcctcccaagtatctaggattacaggtgcttgccaccacgcccggctaatttttgtatttttagtagttggggtttcaccatgttggccaggctggtctcaaactcctgacctcaattgacccacccacctcggcctcccaaaatgctgggattacaggcatgagccaccacgcctggctccaactcatttttacttccatttcagagctttcagtatccatcgtgcatggttttataaaactcaaacttcaaataaggcactaaatcatgttctcagtctagtttaatgcatggtctgaagttgagctactcaaaataattttggaaaagtgtctgtggctgaaatttcattttgctaagcatacaaacctaaaatgaatattattttagtgttgtcctatttgtaagggagatcaggcaaaaaaattaaaggtgtggaatctctattgagccttgatttacagggaaaaggactgtttgagatgacttttcaggttaagagaaaatggactattagagtaaaaagaattgagtcaaatgaattttgttggttcaggaaacagatactggtgtgaaaatgtaaaatggtacaatcatgatgagaaatttgtcaatgtcacaagttaaaatgcacatagcaaacctacttttgagaattgatataaaaacgtacaaatatgtaaactaatgtttacacaagtatattgtttggagcattgcttttaagaaaacataggggctaggtgcagtggctcctgcctataatcccagcactttgagaggccaagatgagcagatcacttgaggtcaggagtttgagaccagcctggccaacatggtgaaaccccgtctccactaaaaaatacaaaaaaattagcgaagtgtggtggtgcatgcctgtaatcccagctactagaggggctgagtcaggagaatagcttgaacccaggaggcagaggttgcagtgagctgggattgcaacagtgccagcctaagagacagagcaagactatgtttcaaaaagaaagaaagaaagaaagaaaacataggaaattccttaatatacagtaggagaaggcatgtttcttaaactaggatgcagccatactggggcctttggcattgttgaaaatgacattccttacgtactgatttggaactatgtttacatgaagaaaacgaaatatgtacttatatatgtgttgtggaaagtctgggaccctgaacggagggaccagctgaagccacagcagaagaacataaattgtgaagatttcatggacatttatcagttcccaaaattaatacttttataatttcttacgcctgtctttactgcaatctctgaacataaattgtgaagatttcatggacatttattagttccccaaattaatacttttataatttcttatgccatcttactttaatctcttaatcccgtcatctttgtaagctgaggatgtatgacacctcaggaccctgtgacgattgtgttaactgtacaaattgtaaaacgtgtgtttcaacaatatgaaatctgattgtaaaacatgagtgtttgaacaatatgaaatcagtgcaccctgaaaaagaacagaataacagtgattttcagggaacaagggagataaccataaggtctgactgcctgcagggtcaggcagaataaagccatatttttcttcttgcagggagcctataaatggacgtttgagtaggagaaatatcgctgaattcttttcccagcagggaatattaataactgataccctggggaaggaatgcattcctgggggtaggtctatagacggccactctgggaatgtctgtcttatgtggttgagataaggactgaaatatgccctggtctcctacagtaccctaaggcttactaggattgggaaattccagcctagtaaattctagtcagactggttgtctgctctcgaatcctgtttcctgttaagatgtttatcaagacaatgcgtgcatagtgggacacagaccctcatcagtaattctaattttgtccttgccttgtgatcttttattgccctttgaagcatgtgatctttgtgacttactccctgttcgtacatctgctccccttccagaatccctaatagaaacttgctggttttgcggctcaggggcatcacggaacctgccgatatgtgatgtcacccctagaggcctagctgtaaaatttctctctttgtactctttctctttatttctcacaccggctaacacttagggaaaatggaaaagaacctacgttgaaatattgggggctggttcccccgaaataaacgcatgttacatatatgtatatttggaattatatatggatataaatacatttgtatgtgtgtgtatatgtgcatatttttatataaaaataccttctctggaaggatatataccaaaataaaaatgttgactctaaggttagctactgtatgactggactatgtggaaggaaaggctgcttatctttttacttaaaccttttcatacctattgaactgttattctatgtatgtattacatatttaaaatacgtaataatgctgatgactaaaacataggcatcctttgatgagtatgtttcccatttgctcaatgtcctcatgaacataaatacatataaacacaaccttggttcctttttttttttttaagacaaggtctccctctgtcaccaaggttagagtggcactgcagcctcgacttcccaggctcaagccgtcctcccacctcagcctcctgagtagctgggaccacaggttcgaacctttttattttttgcagagtcagggtcttgctatgttgcccatgctggtggcgaactcccaggctcaagcaatcctcccacctccgcctcccaaagtgctggcattacaggcatgagccaccacgcctggctcaattcttctgacagcaccttctacccagattttgggcgtttggccacaatttatcttcactgtcttgggatctcatgaccaggcattaccaatgaaagatgtttctccagtctatgggctttaaaatgcagcaaagcccatccatgcaaaatacaaaaagtattacacaagcgtacagaattgtacattataaacctaccttcaggagtttataccaactcaagcgcgcgttgttactcggggtcacagcactgattctacagggcagtcatcacacacgtctgaggcctcagaagagcgtcgaagtcacctttcagcctaccccagccaggttccactcagactcgcctcctggggccctaagaacacaggaacaccgcccttgacctagcgtcagaaacgttccctcacgggttggccgctctgcgcatgcgcactcctagcccaggctgcaactccccgaagcctccgggactcggcggtgggcgtggcgggcggtcgccgtggtcaccacggcttttctcagaggttttaacgcccctagacttcatttcccgacagggactgcgggtctggatattccgtcgtggactacgtttcccactgacgacggagaaaacttggtcctttggctccgcgctgcgcgtgacctgcagtcacctgagcaagagggcggcgtgggtcgctgcgggagcccctacagccccagcccgcagcccacgtggcaccctacagggctgtgagagtggggctgctggaggcgttcagagcgcggaggccccaggcgcgggccgggctctctcccgcctcctcaggcccgggggtgctggagctgccgaggtgggggctcatctttgggagacaggtggggagtgtgagagaccgcgcagcggcgacagggccgggcgtgcctgtgtgacgtgggtgcagctgtgggactgtgaggggtgcgtggtcgaccttgcgtaacctggatgtgcagtgcgtgtcctttgcaaagcgtgcgttgctgtggctccgtggcgtcagcaacccttccctgctgtttcctttgtcctcctctcagtcaagtatgactgccacagagaaatggtcccatccaggaaatcagatattgagtcctacctgagtttccagcaagaaggtacggacttgctgttaggatgggaattatggatcaggaattgccctgagatggggtcctggtaacagatagactctaggataggattccctcctggggattgcggcagagtgtacttgcaagtggagccttgaagggtaagatcataaatgttctacattgtggtgactctggaatttgtagtatttgggacaatacagttactaaaaagacattattgcgtcctttaaaatgtttattatctgtcagtgaaggtaatatctgaataggattaatatgtgttaggcagtgtgtgatcctacctcgtgaattcgctggaaatacacttcagtctgtctatcacaacaggatatgaacaaattataccaatcctgttgaatctatggcaataaatagattttgtgctgtaactttcgtggctcacagtttccttctaattaggttagatgcaaaatgaaagtattataatagaataaagtaattcggccgggcgtggtggctcacacctgtaatcccaggactttgggaggtggaggcgggcggatcacgaggtcaagagatcgagcccatcctggccaacatggtgaaaccccatctctactaaagatacaaaaattagctgggcgtggtggcgtgcgcccagtccgagtagctgggactactcgggaggctgaggcaggagaatcgcttgaacccaggaggtggagtttgcagtgagccgaggtcccgctactgcactccagcctggcgacagatcgagactccatctcaaaaataaaaataaaacaaaataataataattcagaagctgtctgaggggacatgacttatctgacaggcttagaaacaaaataagcctttttgtccagaagatctgaaataaagctgtgtggtgaccgccatcagtttattcaaaagattactcagggactactccccattttttcaagacagaattctgtcatacctgagaagaaatgatcaagtaagttcagataataggatccaaaggaaacaaaagataagacatttagtataacaacgtaaatgtagagaacaaagacattgtctcaagtccctttcttttgggggaacatcttcctgttaacaacaacaacaacaacaaaaactaaaaaagcccacatgtgtttcaagttaacctattgttattattggaataattatgaacaaggctttaaaaattaaaatcaaggtcaaacaaaaagaaaaatagtgttaataggtggccatataaccttccaagtttttgtttactgatttcagtaatcgtctgcttctctgtattgatagtcatgttttataataatgattatattggccaacctgatttttctattgacagtatatctgaaatatttcctgtgtccttaagtatttttcacagcttcccattttacatgtacgatggtctgccatatctagtaagctttgtcagatccaaaatactaaatgctgcctttctgtccccagtgtctttgctcagttcaaaagccacagaagaagttctggacgatgtgggccttcaatcttctaagatgggaatagaaagaagaggatctacccagaccaggaccctgctgcccaatctcaggtctacatctgcctcaccaaaataatacagtggccagaaacctccctgctaacatcatagtttgtctgtgatgcagaaatgcctctgttttgttgttgttttgtttttgtagagacagggtcttgctctgtcacctaggttggagtgcactggcacaatcatagttcactgcagccttgaactcctggactcaagcgatcctaccgcctcagcctcccaagtagctgggattataggcatgcgccatcatgcctagctgatttttattttgtagagactgggtctcactatgttgcccaggctggccttgaactcttgacctcaagcgatcttcctgcctcagcctccccagttgctgggattacaggcgtgagccatcgtgcctggccccagaaatgcttcgcttctatgactttgttcagtggagacctctgtgatttgggggaggaaatagatttatccagaaccccaatttgcccgaattatgtatgatgggaaatagtttgagacctggaatggaagagcatcacagcaatattaagtaacttaaggtctgtcaggaacactaatgcaaaactggtctcaaggtctttcttcttcctccagctctggctttctggatctgtgcttctctggtagaggaaccctgaggactgatctactcttgcagttctaaaaccatggcccatgtaagttcacgtttttctccttgttgaaatatgtgtgtgttggccaggcacggtggctcaggcctgtcatcccaacactttgggaggccaaggcgggtggatcacctgaggtcaggagtttgacaccagcctggccaacatggtgaaaccctgtctctactaaaaatacaaaaacagcccagcatgatggcagatgcctgtaatcccagctactcaggaggctgaggcaggagaatcgtttgaacctgggaggcagaggttgtagtgagccaagattgtgccactacactccagcctggacaagagcgaaacttggtctcaaaaaaaaaaaaaagaaatatgtgtgtgtttttaggtcatgaaggtatttttattaattttcctgaaatttcctaccaggagaggctcatcaaataacatgcttccagctcttattcttccagttcccagcatccacccaatatgtcccattataaacctcctttgttcatgtaattactgagcaaattattcagcatgtcttaagagccctctatcaagggcagtggtggagttaagtccttttaagtaaagatttgtgctttttgggtcaagtctagtttggtaagatagagtcaatggttgtatttgaccatccataacaaaacttaaattatcaccgactggagatttccaggaagtgaagatgaaaatttggtattgaatgatcaaactcagtcattcattgggtgaaatctcatgctttgtgtggttcagtaaatgactggggacttgcaaacttggaggttatggattttggcaagaaacccctcaggaataaatatcaggactattctgatgttggatggaacctactaaatttagatgacatgtatataattcattattcttccttagtattctttaactcaatgcatttgttatctattattacataacaaattagaccaaaacttaatggcttaagacagcaaacatttatctcacagtttctttggatcagaaatccagacatggcttagcttgcctctctggctctcgatctcttacaaggagatccaggttttggtcaggactacagtcatcttaaggcttaacttggggtggatctttttctaagctcactcaactagttgttaacaggatccagtttctcacaggcttcagactgacagtcttagttcctcattcgctgttgcctggaagctgctcttggtttattgtcatgtgggtctgtccatagaatagcttaaaacatggtggctgtgttttaatcagtgagcaaatgagacatcaagagagggagagaaatacagaaaaagtgctgaagtaacatttcagcactgtagctattctgcttattaagagcaagtcacttggttcagcccacgtgcaagggaaggagattacacaagcatgtaatactatcggatggggatctttggtaacctatatagcaagccaggtgctcagtgagagatggtagagagccacaaaagagaatgtcattataagtagcaagtgaacacagaatcctagaactggggaagaccttaaaaatgttgtgtatcctaactgcattgtaaacaagtaagtctgatattgccctaagatataattctcatgtgcccccaaaatacatggatttgtcaaaacaagagaaaaatgcttatggtgagatctgatgtaatgaagtatttaatgcttgagagaattcttaattttatgtaaaccctattttctaaaatcaaggccaggtgctgtaatccctgtaattccaggtgttcacacctgtaatctcaccacttaggaaggctgatatgggagcattgcttgagaccaggagttcaagaccagcctggccaacacagcaagaccctgtctctattaaaaataataataatcaagactttatacttcatttggggaaaatatctgattaaattttttgctcctcttaaaagcaaaaattttccccagcaactcatatgtatttaaaaatttatatggcagataccaatcagacattatgcttatattcactgtttactttcataggcaaacattattattttatttattcccaaatggtgcaagtattttagagtatgccacatagttttctatatgccagcagtctttttcaaaaatacgtatacattccacttcagtccccctcatactgtaaatttgtagacaacatgcttgttacattgctctcttcctgcaatacagtccttatttcccctccatccatcttgaaagtattcctttaatttctccagtaacactatgggtttgccatttcgggcatcaatgacattcagggatgtggccatagacttctcgcagcaggagtgggaatgtctcgaccatgttcagaagaccttgtattgggatgtgatgatggagaactgtagtaacttggtatgttttctgcctcagacaatttaggataactttgaatctgctctctaggatgatttttcattgtgatttttagggctgtctttcaagagactagttaaatttcttttcccttttccccaaagaagtggtttgggctttgttgggtaggaagtgacagcttcactagacatactcatcttccctgtccctcagtgatgttcaaacttttctctggtcatagttacagttgtctttcttcttttataaggaagggctagattaggattcagcagcctatattatataaccattgtaaaaggatccaggtttcctatttctttatgctccgaattactgtggatactccattatagcatctgatccacttgcagattaccttgacataggatcctgaattgctctaattatcaaaagaacctttataatgtatatagctttggattagataaattgaattcatttaaaactgaagcaaacacattctatttcctaagcaaattttaacttattcgtggttgaaagttgtggtttaaagttgtcatctataaacattacattttaaatggaatgaatatcctataaatatcttttcttgtatactcttaacaaaacaacaatatcaataataaccttagtagtgaacactgtgtctattaaaggtagtgttctaagcatttcacatatatgtctcaaccaatttaatccttattaaattcgacaatcttattatatcctcattttccagttgagaatattaaagcccagtggatttaaatgacttgctgaaggtcatgcacagctgggaggtggtaaaggcaggaattgataccaggctctagagtctgtattttcaaccatggtattatgtgtactctcaggaaaaaaaaaaaaagatatgggtgtgtaggttatatttaaaatccttacccaacctaactgatttcttgttctttaatttcctcatcctctcaaaaaccttattcagtttcattttgatccttgatttattacaattgtaattttgacagcaaagtatgtttctatatcaagtggcctttttttctttgtaagcaggacatgacttttctaagccagatgtaattacatcattggagcaaggaaaagagccctggatgattgtaagggaagaaaaaggaagatggtgtacaggtaaaaataagtctgactgtgggaagccatctgtgtaaataacaacctgtgtggtcagggaagagacatacacttgggatgttagttggaaatctccattcacagcagagaaaaggtgtgtgatttataaggaagataaatactctgcataagctacccagtgagcttcaccttcaccttaacattcctggatgggaacttgctatccttgaagtgacaaaagaacaaatgccatccctccaagatctggtgtctggtctacctgcacgtccaggagtcccagccaaaccccggctcttcttttcacttttcttgcttttaccttcttcttgctcatcaatttttacgatgtcttccttaggttcttctgtagtcacctctgaaatatccttcaaatcttttttctctttccacagcacatctgcaattctgccttttctcattgactttttccaaagccttttaatgtgttcttttctttccagcttagagatcacatctccataatctttcatgctaccttgatctatggcttccatggcgtctgtggcctccagggcttctgtggcctccatggcctctatagcttgtaaaatgacctcctgctctgtttcagcataatcctgggatttgactgtgcttagagaactcagtggtagctctggctctaaggtaacatgttgggtttcaactagctctgatttcccggcctctctttgttcacctgcatcttctgaaggcatcaacatggaactagacatttccaattttgtctttctgtgcttcctggcaactctcaggtcctttttaactgcagagatattgggagaaaaacagttaacagaaacacagaggtcttgagtaagatcctttgtaaaatctaattcattgagctaccataagagatacaaagcagggggactaaggctttatgatatggaaatgctcggtttcatcccaccatccatattctaacaaaataagagcttggtatttgctgtggggtagatctttctcaggaatgtcactttctgtgaataagattctcccactgaactccattctcactagtatcctttcatataccttggccttacccaccctgccttttggggccctgaggttggccccaaacatgccccatatatcaccctatacatactaagctttctgctccttgcttgaaaatgtctctttcttttctttggtttggtgatctttacaggttctgacaaaggtatgcacatgtcttcagaaaagaccttaagttcttcagaccatggtatatcaaaagaaaaagtaaatgacttttctctttgtaacaaggtcaagttttcatttagctgctgctccacatgaataagcagggactgtatatcttcagcttgaatattcagcagttggcccagagtgatttctccgataatttcttgcctatataagtcaagggaaaagaagtacagtactaagctagtgatagaacaaaattcaaaaaagaaaaagttacaatggaagagagggataaagtagtaatttagaacaggctgaagtaaagtctggttaaagaagaaagaatgtagctggatgcagtggctaacgcctgtaatcccaacgctttgggaggccaaggtgggtggatcacttgaggtcaagagttcaagaccagcctggccaatatggcgaaacctcatctctactaaaaatacaaaaattagctgggcatggtggtgggtgcctgtaatcccagctactcgggaggctgaggcaggagaatcactggaacctgggaggcagaggctgcagtgagccaagataacatcactgcactccagcctgggtgacagaacgagattccgtctcaaaaaagaaaaaagaaagactgagggatggcaaggaatgtagtgccacataactcgttctattgtgcgttgctttattatgcttcacagacactgtgttttttacaaatggaaggtctgtggcaaccctgcctagagcaagcctctcagcatcatttttccaacaacgtgtgcttgcttcttgtctctgtcacattttgctaattttgatagtatttcaaactttttcatcattattattgtatccattttggtgatatgttatcagtgatcttcgaagtgactattgtaattgtttcaaggcaccgtgagctgcacccatgtaagatggtgaacttcaccaataaatgttgtgtgtattctgactgctctattaaccagccattcccccatcttttctcctcaggcctcgctattccctgggacacaacaatattgaacgtaggctagttaatagccctacaatctcctctaagtgttcgagtgaaaggaagagtcacatgtgtctcactttaaaccaaaagctagaaatgattaaacttagtgaggaaagcatgttgaaagtccagacaggctggaagcgaggtctcctgtgccaaacagcaggccaagttgcacatgcaaaggaaatgttctcgaagcaaattaaaagtattactccagtgaacacacaatgacaagaaagcgaaacagttttattgctgatgtggagaaagttttagtggtctggatagaagatcaaaccagccacaacgttctgttaagcctaaacctaatccagagcaaggccctaatgctcttcaattctatggaggctgagagttgaggaagctgtggaagaaaagtttgaagctagcagagaataattcatgaggttgaaagaaagaagctgtctccagaacataaaagtgcaaggtgaagcagcaagtgctgatggagaacctccagcatgtgatccagaagacctagctgaaataactgatgagggtgactgcattaaataacaaattttcattgtagacaaaacagccttctattcaaagaagatgccatctaggactttcatggctagagaggagtcaatggccggcttcaaagcttcaaaggaaatgccatgtctcctgttaggggctaatgcacctagtaactttaagtcaaagctcatgtgtatttaccgtaatgaaagtcctaggatcctaaagaagggtgctaaatctactctgcttgtgctctataagtagaagaacaaagcctagatgacagcacatctctttatagcatagttcactgaagattttaagcccaatattgagacccactgccaagaaagatagatcattttcaaaatattactgctcactgacaatgtgcctcatcacccaagagatgtgatggagatgtataaggagattaatgtggttttcatgcctattaacacaacatccattcttcagccaatgaatcaaggattaattttgactttcaagtcttatttaagaaacacattttgtatggcaatagctgccatagatagcagttcttctcatggatctagggaaagtaaactgaaaaccttgtggaaaagattcagcattctagatgcaattaagaatacctgtgattcatgggaagaagtcaggtatcaacatgaacagaagtttggaagaagttaattccaaccctcacggatgactttcagaggttcaagacttcagtggaggaagtaactgctgcagttacttgtggtggaaataacaagagaaatagaattagaagtggagcttgatgatgtgactgaattgctgcaacctcatgatcaaacttgaatggattaagaatctactcctggtgaagatgctttgaacattgctgaaaggacaaggatattaaaatattacattaatttagttgatacagcagtggcagggtttgagaagattgactctagttttgaaagaagttctatttgagtaaaatgctatcaaacagcaccacatgctacagagacatctttcatgaaagggagagtgaactgatgcagcaaacttctttgtcttattttaataaaatgttatacccacctcaacctttagcacccaccagtcagcagctatcaatatcaaggcaagaccattcaccaacaacaaaaaaaatgacaactcgctgaaggctcagatgatcattagcaattttcagcaataaagtgtttttaattaaggtatctgcattgatttttttttaagatgaaattttgctcttgtcacccaggctggagtgcagtgctgcaatctcagctcactgcagcctccgcctcccgggttcaagtgattcttctgcctcagcctccttagtggctgggattacaggtgcctagcaccacgcccagctaatttttatatttttggtagagacggggtttcaccatgttggccaggctggtcttgaactcctgacctcaggtgatatgcccgcctcggcctcccaaagtgctgggattacaagtgtgagccaccacgcccagcctgtgcattgattttttagatataatgctactgcacacttaatagactacagtcgagggtaaatataacttttatatgcactgggaaactaaaaaatccatgtaacttgctttactgcagtattcactttattgcagtggtctggaaccaaacccacaatatctccaaaatatgcctgtagtcagtgggacacatgatgcttctttggttgggagatttgtggacatgagtcttgaggaatcttgagaaattgaagaaatgatggaaagacaggctagtcagtggtcagaaggaaaggggtaggtgctgggtaaaagagcaaattgaaacaaagaacaaagagggaggaagagaatttatttatttttatttttatttttttgagactgagtctcactctgttgcccaggttagagtgcagtggcaccatctcagcttgccgcaacatccgcctcccgggttcaagcgattcttgggcctcagcctcccaagtagctgggactacaggcatgcaccaccacacccggctaatttttgtatttttaataaagacagggtttcactatgttggccaggctggtctcgaactcctgacctcgggtgacctgcccgccttggcctcccaaagtgctgggattacaggcatgagccactgtgcctggaaggaatagaatttaaaaagcatttttgaaatgggaagaaacagattttggaggataggagatggaaggaaccagaagaggagaaggtcaccatccaacttactgcattttctggagagtttcgtgtttcttcagcaggtgtaccagcctggtcttggtttggatgcctgtgactcttaccataaggtataaggccttagcctgcacattctcatcactgtccatcaatcccatagccagtggaatagcaaaatgatggttcatgaggcctagcctatccagcgcctcccagggtagttcacggatacgtggattggaatggattgtgtcttgtaggaggcgatgggcagtcttagaaaccaactctgaagatatctggcaagtggcaaaaatacgtttaagtaccctaaaatatctcttgtattcctctacagagcagtaaattgtgaggttgaggatggcctctattaaatcatccataagccttccactatattttcttctcatccaattttggtttgccatgctttcaagaatatcaagggaagttccttttcgcaccttggatttatccttttgttgactccttgaaattttctcttctactagagtcatagatgacaagtcccagtccttaacttggtaggatgaatacagatcacagcataggaagactggggtaccctcaggccaagggcgagcacggatcactgagttggggatggccatcaggagcaaagggccattgccgcccttgaccaaagaagcactgtggcatttggtaggcattgaatccatcccagccagccagctgcaacggagcaggaacctcatgtcggggacgattatacttggaatcaagagtagagaaatcaatatccttatcctccaaaagaggaaatttggtcttttgaatcacaagggacatgcttctctcttcttctacaacatgaggcacagtattgtcaaaagcaatgaaccgtttgttgacaagggtctctagcccctgtaattcctgccgcccttttccaaggtagacaaatctgggtacaaatactgtttcaaacataaagaagaagctaggaaggaagggtttagggacttcttgtatttcatctgcattttttaggatacgcaggtgaaccagctgagctggagggagcagctttaagcaagatactatgtagatacgctggttgaaagtcaacaacaggtcacttcgattactggcaaagcagagtggtccaaaatgcagggctgagtcgaactcggttacaagtctaccgtggaagtcccagatccggactgagccatcaatgccacctgtgacaaaaagtttcaggggaaggcagacatcaaatgaagtgatgtcacactcatgcaggcattttgtctctctccacacaaagctctgttttgattctgaagatgtcagaaagccttcatagtgccagagacaccagcagtagctttcagtgatggcacccacagaacctggcaagagtatcacacgttttagggggcagccacagaggattttgctgacaggctgaaggactaccttgttcacctgaagcacggcctctgtcaagtgtatgatgttatccgtgccataggaacagagcaaggcgtttccctgagggccttccagggtagacaatgccaatactgccccagagtgaacagtcttctctattcgggcacaactatagtgggaaagggttctcacaatgccactctcatgcccacagaacatcaatcctcctaggcctttttgcagatgggacctcccataggccaagcatcttactgtatccttacggtctgctgaagtgcacacaagatacttggctgtacaaggagagcgtgttgcatcaaacaccagcacctctgaactgcctattgccacaaagagttcctctctctctgagtcataggcccaagccaaagccttatccataacaagtagaggccaagtgataaccaggagatcccctgttactggagacaagaagcgcaataaaccatcctcagtggcacatagaatccgagtccagttatggccgcagcagacccgctgcacttgctggggagcagaaccacagacattgaagaggctataaaagtagggcaggtgatgcaatgaaaaactgtaggtggtctggcagaaaaaagtggtattatcaataaactgcagtctctgaagatcctcgtcaatattcagctgccgcagcaagttcccataagtgagattccattccctcactatgccttcactgcctgctgttagtaaggtgtggatctctggccggctatggatacatatcactgatgaggaatgggcttgaaagctgtggaggaagttaccttggtctaaaccccaagcgtggatctctccagccctgtttccagcatagaaattgccctgagagacacaagtaaaggagcaagtgatggaagagccactggcgacaggagtgaacttcacttcttccagctggccctgaccccggtgaatgaagaccctcactgtatcctcacacagagccaacagggatccctgggggccattcagggaaaatccctgtacaagctcatgatcagccataggtactatttgagccatctcgatgcccatgccatttggtaagataaaccaggtaaccacagcccccagggtaccagagagcagcaactcagcttctggatcatagaagaggcagctggtggagaaatgacagggcactgtacccagaaatctgaacgttcgacggtgatctccaaaaagcctcaggcgcatgtcaccacagtaagcaattaacatgtggtaggaacctgtgtggaccattgcttgaatgggcggccactgatccatcatgcgaagcctcatcttctctaccattcctttcatttctgtaccctttttttgtatccaaagtactgcctagaagaggatgagagatgaaagcctgactgtggaggtggatcattttccaaagtgtggggtagggaaggctgaatattcagatccctgttccctctggtgtgactaaggaaagactagacagcttgactttaggaatctcctagtacagcagctcccacttacccatggtttccctttctgtggtttcaactacctgtgtggtcaactgcagtccaaaaatatcaaaagaaaaattccagaaataaacaattcataagttttaaatggcatgctgttctgagtagcaggatgaaatctcaggcagtcccattccatcctgcctgggacttgaattatccctctgtccagcctatctacactacataccctatctgcctgttacgtcacttagtagccattgcagttatcagattaactgtcgcagtatcgctgtgcatgtgttcaagaaaccctcattttatttcataatggtcccaaagcacaagaatagtaatactggcaattcagatatgccacagagatgccacaaaatgcttcctttaagtgaaaaggtgaaggttcttgacttaataaggaaagcaattgtatgctgaggttgctaccatctatagtaagaatgaatcttcttggccgggtgcagtggctcacgcctgtaatcccagcactttgggaggccaaggcgggcggatcacgaggtcaggagttcgagaccagcctgaataacatggtgaaaccctgtctctactaaaaatacaaaaattaatcgggcatggtggtgcgtgcctgtaatcccagctactcaggaggctgaggcaggagaatcactggaacctgggaggcggaggttgcagtgagccaagatcgtgccactgcactccagcctgggcagcagagtgagactctgtctcaaaaataaaaaaaaaaaaaagaatgaatcttctgtgaaattgtgaaggaggaaagacaaattcatgctagttttgctgttgcacctcaagtgcacgcattatggacatagtgcatgatagcacttagttatgagggaaaaagcacaaaatttgtaggtgagccacatgaacacaaacatgttccaattgatggcagtcaggtttggtactatctgcaatttccgatgtccactgggggcttggaatgtatcccccatgaattcgtggggactattatactaggaattgggtatgtgatagaagcaccatgttcaaggcccttttcttggccttcagtctacttgatggagaatatgaattctgagggcctgataacatgaggtgaagaaggatcactgcatccagtcaaactgggatatggagatgggtactaaaatgagctaattcacagtcactaccatcattctaaaatgagggcagttcaggtgtgatgcatgtaaattgaattaagaaggagagggggaaaaacgaggtggctttacctgcatttttccacagggttccatccagtttaaggagacaaaacagttgaccttgatggagtagtagaagcagacaaaaggcttgttctgtggatggtgagactcccggtatagagtctcaggccagtcactcagtagaaccacatcattctttggttcttcatcattctgagagagaagaatgacctgagttaagagttctgagtccccactcattcactcatttcagaaatatttactggccaggtgtggtggcttgcacctgtaatctcaacactttgggaggccaaggcaagcagatagcttgagcctaggagtttgagaccaatctgggcaacacagcaaagccccatctctacaaaaaatacaaaaattagctgggcatggtggtgcatgactgtagtcccagctactcggaaggctaagtaagacaggaggatcgcttgagcccaggaggtcaggccacagtgagccatgactgtagcactgcacgccagcatgggtgacacagcgagaccctgtctcaataagtttaataaataaataaatatttactgagagatgagtggtcatttgttgtttttgagctaaccaacgtttaccctactactggaaagcagcactggaggggtcatccctccctcaccctcagtttgcaacagaatacatctgtatcaattggtctcttctacactttctcaaccaagtttccataaaaaaaagtaagccctcatgtcctaaagtatccaatctacataatgaattgatttctttcctagtcatctagaatgctactagttatgaggcattgagagaaatgagaaagtagcccctcaaatcatgttctgtgttccatgattcagatgaagagccacagttgagaaaggctgacaggttctatgaaagattctgagggtacagtgctgagcaaaacagacatggctctggctcttaagaagatgagtcagaggggaaacagacgttaaacaaataactaacaactgagtatacaaaacaagtaaatgcttacaaagaaaggaatacacggtggctcacccctgtaatcccagcactttgggaggccgaggcgggaggatcacaaggtcaggagaacgagaccatcctggctaacacggtgaaaccccgtctctactaaaaatacaaaaaattagctgggtgtggtggtgggcgcctgtagtcccagctactcgggaggctgaggcaggagaatggcgtgaaccccaggaggcagagcctgcagtgagctgagatcgcaccactgcactccagcctgggcgagagcgagactccatctcaaaaaaaaaaaaaaaaaaaaaaaaaaaaaaaagaaaggaatacaattctgtatgacagaggaacccaaccatggcaaatatgtatacctgtcacagttggaacaacttttttaagttccagcctacaccaaaaggaccactcttattagaattgcacacacgatacactgcctttgggaaactcatacttcacagtatgtaataggatgaccaccatgtgtggcagaccttgtcgcatgcacctctgtcactattctttctttatttatttatttagatggagtctcgctctgtcgcccaggttggactaaggtggcgcgatcttggcttactgcaacttctgcctcctgggttcaagtgattctcctgcctcagcctcccgagtagctgggattacaggcgcccgccaccatgcccggataatttttgaatttttagtagagacagggttttgccatgtttgtcaggctggtctcgaactcctgacctcaagtgatctgcccacctcagcctcccagagtgctgggattacaggcgtgagccactgtgctctgcattctgtcactattcttatgtgtacccaaggggaatgtgtgctatttacaacatggagttagctgtgtgtcagctcttctggccatgtggggtgtgtgtatatatatgtacctatcaagggagttacataccttgtaataggttacacagtagaacatatacaatacatgccaccttccagtgatgtagcagatgtctgtaatgtatgtacatgaagtcctcatgctgatcagccaaaactgagttcatgaagtttacttctggggtcacccttctcagtagctacttgaactatacccacctcctgaacaatgccccatggatctaactctccaagtttctctgcatcagaatttgtgctctgaccaactaagttggaaggtataatactaaatcaactgaagtattaaaacaactttacttataatgtccatcatacctgcttcctgcatccacaaaggatttgagactatactgaggccaatatctatctacaacttagaatctctcttctttctgtatttcttttttctttctctctctcttttttttctttagagacagagtcttgctctgttgctgttgacgtgactagagtgccatggtgtgatcatagctcactgtaacatcaaaatgctgggctcaagcaatctttccaccttagcctcttgagtagctgggactatagtcatgcaccaccacacttggataattttttttatttttgtagagatggggtctcgctatgctgcccaggctactcttgaactcctgggctcaagtgatcctcctgtcttggcctcccaaagtcctgggattacaggcgtgagccaccatgcccagccctacctgtatttcttattttcagatctcaagagcttacagcaccattgtcattgctgattcagtagcagtagcagagttgagtgaaaggaccctggtgtctgagctcccaacccctcatctctcttaatcagaaagctcatttacatacctcttattccattagttaatcatcattccttttctcctttccagcctttatgtacaaacaattcattcactcattaaatgagatcaacgctttgctatggaaaaaaactaagaatatcttaacgcaatgtatctgcctgatattactgctacctactctacatcaaatccttctccttcctcttccccctccttccatccgaatgaaattctgatttggcttagggcgatcatggacccagaaacttcagcaacatagagtactactatagtactccaaggctggcatggccctgtggctctctgagcttccctcttctatcttctatctacttgcaatttgaggctgatacctggaagtgcaacgactatcttgtaagcctaggataataagctaacataatagaaatggtggaaaagaaagaaaaagaatgcaggtccttgacaacacgtaggacaaagatgcctcttacttgtttaatccatataaatccattttctgttattgcagcagaaagtgttctaacttacctaatgcgatcatcttaatttagcaggggaagttattgggggatgtggaagggtctttcctaagttgcctatgtcttgcccatgccacagcctgccttggcaggaataattagtccagggccaccatgtgcacagctctcatacacatcacctttatgtccttcaggatcttatttatgaggaacttcaagttcttccactcaggaataagtctggatgaagatgatttcctagtgatatcccagctctttacagacatcttggattacagaacctgtggaaggtaaaggtctcttaatcaacaacatctaatgttagaacggaaattaagggaattgggaaagagggaagggcagcaagataaattagagaagtactcctttagaagccaggcgcggtggcccatgcctgtaatcccagcactttgggaggccaaggcaggtggatcacttgagcccaggaatttgagaccagcctggccaacatggtgaaaccccatctctactaaaaacacaaaaattagcttggcatggtggcacgtgcctgtaatcccagctactcgggaggctgaggcagaagaatcgcttgaacctgggaggaggaggttgcagtgggccgagattgcgccactgcactccagccttggcgacagagcgagactccatctcaaaaaaaaaaaaaaaaaaaaaaaaaaagaagtgctcccttagaaacaggagaaactcctttgttttaaaaaagataggaatagaagaggccttggggaggagccaagatggccgaataggaacagctccggtctacagctcccagcgtgagcgacgcagaagacgggtgatttctgcatttccatctgaggtaccgggttcatctcactagggagtgccagacagtgggcgcaggccagtgggtgtgcgcaccgtgcgcgagccgaagcagggcgaggcattgcctcacctgggaagcgcaaggggtcagggagttccctttctgagtcaaagaaaggggtgacggacgcacctggaaaatcgggtcactcccacccgaatactgcgcttttcagaccggcttaaaaaacggcgcaccacgagactatatcccacacctggcttggagggtcctacgcccacggaatctcgctgattgctagcacagcagtctgagatcaaactgcaaggcggcagcgaggctgggggaggggcgcccgccgttgcccaggcttgcttaggtaaacaaagcagccgggaagctcgaactgggtggagcccaccacagctcaaggaggcctgcctgcctctgtaggctccacctctgggggcagggcacagacaaacgaaaagacagcagtaacctctgcagacttaaatgtccctgtctgacagctttgaagagagcagtggttctcccagcacgcagctggagatctgagaacgggcagactacctcctcaagtgggtccctgacccctgacccccgagcagcctaactgggaggcaccccccagcaggggcacactgacacctcacacggcagggtattccaacagacctgcagctgagggtcctgtctgttagaaggaaaactaacaaacagaaaggacatccacaccgaaaacccatctgtacatcaccatcatcaaagaccaaaagtagataaaaccacaaagatggggaaaaaacagaacagaaaaactggaaactctaaaacgcagagcgcctctcctcctccaaaggaacgcagttcctcaccagcaacggaacaaagctggatggagaatgactttgacgagctgagagaagaaggtttcagatgatcaaattactctgagctacgggaggacattcaaaccaaaggcaaagaagttgaaaactttgaaaaaaatttagaagaatgtataactagaataaccaatacagagaagtgcttaaaggagctgatggagctgaaaaccaaggctcgagaactacgtgaagaatgcagaagcctcaggagccgatgcgatcaactggaagaaagggtatcagcaatggaagatgaaatgaatgaaatgaagcgagaagggaagtttagagaaaaaagaataaaaagaaatgagcaaagcctccaagagatatgggactatgtgaaaagaccaaatctacgtctgattggtgtacctgaaagtgatgcggagaatggaaccaagttggaaaacactctgcaggatattatccaggagaacttccctaatctagcaaggcagaccaacgttcagattcaggaaatacagagaacgccacaaagatactcctcgagaagagcaactccaagacacataattatcagattcaccaaagttgaaatgaacgaaaaaatgttaagggcagccagagagaaaggtcgggttaccctcaaagggaagcccatcagactaacagcggatctctcagcagaaaccctacaagccagaagagagtgggggccaatattcaacattcttaaagaaaagaattttcaacccagaatttcatatccagccaaactaagcttcataagtgaaggagaaataaaatactttacagacaagcaaatgctgagagattttgtcaccatcaggcctgccctaaaagagctcctgaaggaagcgctaaacatggaaaggaacaactggtaccagccgctgcaaaatcatgccaaaatgtaaagaccatcgagactaggaagaaactgcatcaactaacgagcaaaatcaccagctaacatcataatgacaggatcaaattcacacataacaatattaactttaaatgtaaatggactaaattctccaattaaaagacacagactggcaagttggataaagagtcaagacccatcagtgtgctgtattcaggaaacccatctcacgtgcagagacacacataggctgaaaataaaaggatggaggaagatctaccaagcaaatggaaaacaaaaaaaggcaggggttgcaatcctagtctctgataaaacagactttaaaccaacaaagatcaaaagagacaaagaaggccattacataatggtaaagggatcaattcaacaagaggagctaactatcctaaatatatatgcacccaatacaggagcacccagattcataaagcaagtcctgagtgacctacaaagagacttagactcccacacattaataatgggagactttaacaccccactgtcaacattagacagatcaacgagacagaaagtcaacaaggatacccaggaattgaactcatctctgcaccaagcagacctaatagacatctacagaactctccaccccaaatcaacagaatatacgtttttttcagcaccacaccacacctattccaaaattgaccacatagttggaagtaaagctctcctcagcaaatgtaaaagaacagaaattataacaaactatctctcagaccacagtgcaatcaaactagaactcaggattaagaatctcactcaaagccgctcaactacatggaaactgaacaacctgctcctgaatgactactgggtacataacgaaatgaaggcagaaataaagatgttctttgaaaccaacgagaacaaagacacaacataccagaatctctgggactcattcaaagcagtgtgtagagggaaatttatagcactaaatgcccacaagagaaagcaggaaagatccaaaattgacaccctaacatcacaattaaaagaactagaaaagcaagagcaaacacattcaaaagctagcagaaggcaagaaataactaaaatcagagcagaactgaaggaaatagagacacaaaaaacccttcaaaaaatcaatgaatccaggagctggttttttgaaaggatcaacaaaattgatagaccgctagcaagactaataaagaaaaaaagagaagagaatcaaatagacacaataaaaaatgataaaggggatatcaccaccgatcccacagaaatacaaactaccatcagagaatactacaaacacctctacgcaaataaactagaaaatctagaagaaatggatacattccttgacacatacactctcccaagactaaaccaggaagaagttgaatctctgaatagacaaataacaggagctgaaattgtggcaataatcaatagtttaccaaccaaaaagagtccaggaccagatggattcacagccgaattctaccagaggtacaaggaggaactggtaccattccttctgaaactattccaatcaacagaaaaagagggaatcctccctaactcattttatgaggccagcatcattctgataccaaagccgggcagagacacaaccaaaaaagagaattttagaccaatatccttgattaacattgatgcaaaaatccttaataaaatactggcaaaccgaatccagcagcacatcaaaaagcttatccaccatgatcaagtgggcttcatccctgggatgcaaggctggttcaatatacgcaaatcaataaatgtaatccagcatataaacagagccaaagacaaaaaccacatgattatctcaatagatgcagaaaaagcctttgacaaaattcaacaacccttcatgctaaaaactctcaataaattaggtattgatgggacgtatttcaaaataataagagctatctatgacaaacccacagccaatatcatactgaatgggcaaaaactggaagcattccctttgaaaactggcacaagacagggatgccctctctcaccactcctattcaacatagtgttggaagttctggccagggcaatcaggcaggagaaggaaataaagggtattcaattaggaaaagaggaagtcaaattgtccctgtttgcagacgacatgattgtttatctagaaaaccccatcgtctcagcccaaaatctccttaagctgataagcaacttcagcaaagtctcaggatacaaaatcaatgtacaaaaatcacaagcattcttatacaccaacaacagacaaacagagagccaaatcatgagtgaactcccattcacaattgcttcaaagagaataaaatacctaggaatccaacttacaagggatgtgaaggacctcttcaaggagaactacaaaccactgctcaaggaaataaaagaggatacaaacaaatggaagaacattccatgctcatgggtaggaagaatcaatatcgtgaaaatggccatactgcccaaggtaatttacagattcaatgccatccccatcaagctaccaatgactttcttcacagaattggaaaaaactactttaaagttcatatggaaccaaaaaagagcccgcatcgccaagtcaatcctaagccaaaagaacaaagctggaggcatcacactacctgacttcaaactatactacaaggctacagtaaccaaaacagcatggtactggtaccaaaacagagatatagatcaatggaacagaacagagccctcagaaataacgccgcatacctacaactatctgatctttgacaaacctgagaaaaacaagcaatggggaaaggattccctatttaataaatggtgctgggaaaactggctagccatatgtagaaagctgaaactggatcccttccttacaccttatacaaaaatcaattcaagatggattaaagatttaaacgttagacctaaaaccataaaaaccctagaagaaaacctaggcattaccattcaggacataggcgtgggcaaggacttcatgtccaaaacaccaaaagcaatggcaacaaaagccaaaattgacaaatgggatctaattaaactaaagagcttctgcacagcaaaagaaactaccatcagagtgaacaggcaacctacaacatgggagaaaattttcacaacctactcatctgacaaagggctaatatccagaatctacaatgaactcaaacaaatttacaagaaaaaaacaaacaaccccatcaaaaagtgggcgaaggacatgaacagacacttctcaaaagaagacatttatgcagccaaaaaatacatgaaaaaatgctcattatcactggccatcagagaaatgcaaatcaaaaccactatgagataccatctcacaccagttagaatggcaatcattaaaaagtcaggaaacaacaggtgctggagaggatgtggagaaataggaacacttttacactgttggtgggactgtaaactagttcaaccattgtggaagtcagtgtggcgattcctcagggatctagaactagaaataccatttgacccagccatcccattactgggtatatacccaaatgactataaatcatgctgctataaagacacatgcacacgtatgtttattgcggcattattcacaatagcaaagacttggaaccaacccaaatgtccaacaatgatagactggattaagaaaatgtggcacatatacaccatggaatactatgcagccataaaaaatgatgagttcatgtcctttgtagggacatggatgaaattggaaaccatcattctcagtaaactatcgcaagaacaaaaaaccaaacaccgcatatactcactcataggtgggaagtgaacaatgagatcacatggtcacaggaaggggaatatcacactctggggactgtggtggggtggggggaggggggaggggtagcattgggagatatacctaatgctagatgacgagttagtgggtgcagcgcaccagcatggcacatgtatacatatgtaactaacctgcacaatgtgcacatgtaccctaaaacttaaagtataataaaaaaaaaaagataggaatgaaaatgaactactagtatttgcaacaacatagatgaaactcaaaaacttaatactgagtacaagaaggcagacacaaaacagcacgtattgtatgattccatctatatgaaattctagaaaagagtcatctaggccgggcgcagtggctcacgtctgtaatcccagcactttggggggccgaggcaggtggatcacgaggtcaggagttggagaccatcctggccaacatggtgaaaccccatctctactaaaaatacaaaaattagccaggcgtgatggcgtgtgcctgtggtcccagctactcagaaggctgaggcaggagaatcgcttgaacctgggaggcggaggttgcagtgagccaaaatcatgccactgcactccagcctgggtgacacagtgagactccgtctcaaaaaaaaaaaaaaaaaaaaaaagtaatctagccaacagggccagaaagtagatcagtggttacatggggcaaagatttaggaggactgagtgggaagggatgaaagggaactttttgtagtcttgtaatgttctgtatcttgactctggtagtggttacatgggtatagaaattggtcaaaactcatcaaaaaaatatggtatactttattacatgaaaattatacctaaataaatttgattttatttgtttgtttagaaagtcttgctctgacactcaggctggaatgcactggagtaatcaaagttcactgtaacctgcaactcctgggctcaagggatccttctgccttagcctcccaagtagcttggactacaggcacatgccatcatgctcagctaatgttttattttttgtagaggtggggtcttgctatgttgcccaggctggtctcaaactcctgccctcaagcagttctcctgcctcagcctcccaaagtgctgggattacaggtgtgagccaccacactcggccttaatttcatttttaagagggaatagagtgacctggcacaatggctcatgcctgtaatcctaacactttgggaggctgaaacggaaggatcacttcagctcagaagtttgagaccagcctgggcaacataatgagaccttttctctaaaaaaattttcaaaaattagccgggtgtggtggcaagtacctgtagccccagctactcgagtacctgaggcgggacaagtgcttgagcctgggaggtcaaggctgcagtgagttgtgatcatggcaccgcactccagcctggatgataaagcgagaccctgtcctaaaaaaagaaaaaagcgaggcgtggtggttcatgcctgtaatcccagcactttgggaggccgaggcgggtgaatcacaaggtcaggagttaaagaccagcctggccaagatggtgaaaccccgtctctactaaaaatacaaaaattagccgggtgtggtggtgcatgcctgtaatccaagctactagggaggctgaggcaggagaatcgcttgaacccgggaggcggaggtttcagtgagccaagattgcgccactgcactccagcctgggcaacagagcaagactccatctcaaaaaaaaaaaaaagaaagaaaaagaaaaaaaggccgggtgcagtggctcttgcctgtaatcccagcactttgggagaccgaggcaggcgcatcacaaggtcagcgtcaagagatcgagaccatcctggccaacatggtgaaaccctgtctctactaaaaatacaaaaaattagctggtcatggtggtgcacgcttgtagtcccagctactcaggaggctgaggcaggaggatcgcttgaacctgggaggcagaggttgcagtgagccaagattgcaccactgcactccagcctggcgacagagcgagactccatctcaaaaaacaaaccaaaaaaaaaaaaaaaagaaagaaaaaagaaaaagaatagagtgaagtgggtgctttatatagtctagaaacagaacaaaaaatacattaagtaaagctttcaggtgagtttaggtgagccagctgtagcttagctgaaataatgcaggggcctagccctcccttagctctctttattaggaatctaatatttgtggacataattatatttattaaccatcatccttctttcctacggaagtcctcatatatgtaaaagtcacccactttccacaaatatttcctcacggctcattatatgccgactgtgctgagagctagagatgaagcagggaagaagaatgagtatctgcctggatggggtttactgtctagcatagaagacaggcactgaacaagttcatatagatatccaattatgacaagatgccaggctaaaataacctgaaagcctcacactacaaaatccgagaaattctgggtaaaataacaagtacctgagcttcaggaaccagaaactagggaagtagagggtaacccacagcaacaagtgctgactactgttgtgctggtcctgagaaggtgtagttaccagagcccataaagaccacaaatatcaatgaccacaatggctagtggcttggatagtattgccctggtaaagagaagacccaggactcgggccaatgatagggagttggaattaaaacccttccatgaagcactggaatgcttgacaaaaacaaacctcagagagagagacttccacagacagagctgactcatgaccagcttcctgaaagcttacacttctttaaacttttatccaggcataccccaaattcacagggatacctatcacgttctccaaatgattctctgacatgtccctcacttggactgacaagggagaaaagaaagaaggagaaacaccacagagcacatcaacaattctctctggagaaatcatcattttaatttttatacccaagaggataataatttaagagtcacaaaaaaaatccttcacaatctcttagcatgctcttcatatgttatcaaacacctactgatctcaaataaaactcccagaacacggaaagtcagatttaacattctgttatatgtgtatattaaaaatgttaaggaaactaccataaagaaaaaaaacaaaaacagaggccgggcatggtggctcatgcctgtaatcccagcactttgggaggccaagatgggcagatcacctgaggtcaggagttcaacaccagcctggccaacatggcaaaaccccacctctactaaaaatataaaacttagccgggcatggtagcatgcacctgtagtcccagctactcgggaggttgagtcaggagaatcacttgaacctgggaggtggaggttgcagtgagccgagatcgctctaatgcactccagcctgggtgacacagcgagactccatctcaaaaaaaaaaagagagagagaaagaaagaaaaaaaacaaatagaatgcatgattttaccagttgaggaaaaggggtatgaaataaagaaaacattagaaaacattaaccaattcaatattagaaataaaataagaagggaaaaagaggtatgatatatagaaatgaggtgatagaaacaaatctttcattatcataataaatatagattaaactcatcacataaaagagagaccaaattgaatatttaaatgaattaagtacgtgctgtttataagagaaaaatctaaaacgtaagacatagaaactttacagtatcatgggcttctgttccttaaaatgatctgaaagcaataaggagagtaaaaaaaatctttgcaagctcaacattcagcaaaacaaggagaagtataatctgtagacaacaaattacatgtaaaagttgggaaaagcagctcaaatgaggaacaactatagggaggaagtggagacaagaaactatgcaaagaaatttgagcagaaagaaagacaaacagaagcagatataagaaaacacctgtggtggctcacgcctgtaatcccagcactttgggaggccgaggcgggtggatcatgaggtcaggagatcaagagcatcctggccaacatggtgaaactttgtctctactaaaaatacaaaaattagccgggtgtggaagtgtgtgcctgtagtcccagctattcaagaggctgaggcaggaaaattgcttgaacccgggagatggaggttgcagtgagccgagatcgtgccactgcactccagcctgggcgacaaagcgagacttcatctcaacaaagaaaaaaaaaaaaaaagaaagaaaaagaaaaagcaaaggaaaagaaaacacctgggaaattaaatttcctacaggtgaggagtccaccgtcaggtagggatctatacctcttgtttgcaactacactgtaagaaactggaaagcaaaaacagaggagacagagttgatcagtctcctacaaaagccatatgtgaggcagaaggaacctcttaaaagaaaaactcatccaggaaaacccaacttaggcaatgttctgcaagaaaaaagggactagctacattaacccaaaactacaaaacgaactctgaaggaaagagtaacaaagtaaactaacatatgaagagctttcactggaaaactgcctcaatggatcagataaaaattataactaggccaggtgtggtggcttttgcttgtaatctcagcacttcaggaggctgaggtgagaagattgcttcagcccaggagttcaagaccagcctgggcaacatagcgagaccccgtctctacaaaaaataaaaaactagccaggagtggtggcatactactgtagtctcagctactcaggaggttgaggtgggaagattgcttgagccctggaggttgaggctgcagtgagctatgatctcaccactgcactccagcctggacaacagagtgagacactgtctcaaaaacaaaaaaaaattataaccaaatattttgccgtgaatgaaaaaaaagacttgatgcaatttcctctgtgatggaagaccacaaagcaaaaatataaaaatccagggaggagatgctgaaagaacagggtaagaacaaatagagagcaggcagaaatcgaagaaaaatcaagtatcacaagcataaggacaaaagttgaaagaacacaagggagaaaaacccagtgaagaacctggaggacaaaaatgggaaaagcaggccgggcgtggtggcttacacctgttatcccagcactttgggaggccgaagcgagaggatcacttgaggtcaggagttcaagaccagcctggcaagcatggagaaaccccgtctctactaagaaatacaaaaattagctgggcatagtggtgtgtgcctctaatctcagctacttgggaggctgaggcaggagaatcgcttgaacccaggaggcagaggttgcagtgagccgagatgggaccactgcactccaacctgggcgacagaacaagattcagtctcaaaatgaaaaaacaaacaaacaaaaaaaacaaacaacaacaaaaaaaaaccagaaagaattacttagaaaatatgtagtttcaacaaatgttgctgggacaactgaatatctacatgcagcataataaatttggacttctacctcaaaccattaaaaaaattagcacgaaatagatcaaatacctaaatataagaactaaaaccaggaatctttgtcactttggactaggcaacggtttcgcagacatggcaaaccataagcaactaaaaaaaaactggacttcatcaaaattaaaaacctttgtgcactaaggaaaggacactattaaaaaaactgaaagatttcacacaggtccaagatttgctgaaaaaggaaaaaaaaagaaagaaaaagtgaaaagacaacccacagaatgagagaaaatatttgtaaatcatgtatctaatacgggcctagtatcctgaatatataaagaactgttacaactgaactacaaaaaggcaaataacccagttaaaaattggacaaaggatttgaatagaaattactacaaagatatatacaggctgggtgaggtggctcatgcctataatcccagcactttaggaggccaaggcaggcagatcacctgaggtcaggagtttgagatcagcctggtcaacatggcgaaaccctgtctctactaaaaatacaaaaatgagccaggcgtggtggcatgcacctgtactccccgctatttgggaggctgagacaggagaatcccttgaacctgggaggcggaggttgcagtgagccgaaatcgtgccactgcactgtagcctgggagagccagatttcgtctccaaatatatgtgtgtgtgtgtgtgtgtgtgtgtgtgtgtgtatacaaatggctaagagccacatgaaaagatgctcaacatcactggttattagggaaatgcaaatcaaaacctcaataagatacttcacatctaccaagatggctttaattttttttaatggaaaataacaagtgttggcaaggaaatggagaaatgggtaccctctgacattgcttgtgggaatgtcagatggtgcagtggctgtggaaaacagtatagtcaattgttttaatttaatgttgtcttggtatcaattttaaatacaagtttaactttctcatacaagaaacaggaatcagtcacccttgacacagttttcagttccataccacacctaaaggactcaggacggtggccagagataagaacttagaggcatctctcccacctagaagactgggctccctgcggttccacagcttcctttaaaataatttgtcggctgggagcaatgactcacacctgtaatcccagcacgctgggaggctgaggcgggtggatcatttgaggtcaggagttcgagaccaacctggccaacatggtgaaaccctgtctctactaaaaatacaaaaaattagctggacatggtggcgggcacctgtaatcccagctactttggaagctgaggcaggagaatctcttgaacctaggaggcagaggttgcagcgagccaagattgtgccactgcactccagcctgggcaacagagtaagacactgtctcaaaaaaaaatttattatattaaataaataataataataataaataataaataaaataaaataattcgcctatgggccaggcacgatggctcatgcctgtaatcccagcactttgggaggccaaggtgggtagatcacttcaggtcaggagttcaagaccagcctggccaacacggcgaaaccccagctctattaaaaatacaaaaattagccaggcatgttggtgcacgcctgtagtctcagctacttgggaggctgaggcaggagaattgcttgaacgcaggagacagaggttgcagtgagccgggatcagacagaacaaaactccatctctaaataaataaataagcctgtgaacttaaagtgatccacaccctgttcccttatatatactgccagtttcttctctctttctctctggccacctgactcttcattcctgccttgcatgttccggggacatctggactgccttccagactcactgtgccttccctgcccaggatctgtaagtaaaaaaatctttgaacctgttttctattgtggtaatgtgttggatttgcaccttccatctaaaaaactaggggctgcctcaggctgggtttccccaaggatgcgagagggaacataacgctgggctcccggtgtcagagctggggcatgggtcagacaagagccacaaggacatctgccagtataaacaagtttcctgcacaaagtttcccctggtcatgggtgggacaactgagagtcaggatgtctaccaggtaaaagaaatattctaggccaggtgtggtggctcacacttgtaatcccggcactttgggagaccgaggtgggaggatctcatgagtctgggaatttgagaccagcctaggcaacagagtgagacatcatctcaaaaaaaaaaaaaaagtattctgtgaaagtcacactgtaaacacccatatccagctccccttcatttcccattaggtttaggattgctagctgctctggtactggaacccaattttttttttttttttttttttgagatagagccttgctctgttgcccaggctggagtgcagtggcactatctcagctcactgcaacctctgcctcccaggttcaagtgattctcctggctcagcctccagagtagctgggactacaggagtgtgccatcacatccggctaatttttgaattttcagtagagacggggtttcaccatgttggccaggctggtctcaaactcctgacctcaagtgatccaaccacctcagcctcacaaaatgctgggattacaggggtgagccaccttgatttttttattattaagttcaacatacattagattactctgtaaaactgctataaaagttcctaaatgcttactctgaatttctgtacttatcttgtggaggagaaggacaaatagctcccagctgacaccagtgtgctaatggaggacctcctttgggatttctatccctagctgaacaattctagccctttcttttccacctagcaagagtcactacctctttttcttcttttatcttactaaatttctaccataagtaaagcttatttattttattattatttttagatggattctcactctgtcacccaggctggagtgcagtggtacaatctcggctcactgcaaactctgcctcctgggttcaagcaattttcctccctcggcttcctgagtagctgggattacaggtgtgcaccaccatggctggctaatttttgtatttttagtacagacagggtttcaccatgttggccaggctggtctggaactcctaacctcaggtgatctgcctgcctcggcttcccaaagtgctgggattacagccatgagccaccacacccagcctaccataagtaaagtttaaactttccaaaatcctgcatacaactctcaagtacatgcaagggaagaccaagtggcccctgcaaagaaggattttttaaaatgagaaaattaaacatatttaaaagtcaaggggaagaagccactaagaagggagagtgaaagtacaggaaagagagagtgggctgctacagcaagctgatgtgtgaagagaaataagagttcgatcccacaatctcagagccttcccaaagtttcctctggtgatttacgactaggagctctaactgggaaaatgggggtttcctgacgcttctaaatcttagactaagacttcattccattaagtttttggtgagagtcagatatttcactttaacccttcttgacctcagagaaattccctgttctttttccctactaaagcatttagaaaaagagaggctgggtgcagtggctcatgcctgtaatcccagcacttttggaggccaaggcggatggatcacctgaggtcaggagttcatgaccagcctggccaacacggcaaaaccccatctcttctaaaagtacaaaaattagcatgcacctgtaatcccagctatttgagaggctaaggcaggagaatcacttgaaccttggaggcggaggttgctgtgagctgagatcgccccactgcactccagcctgggcgacagtgagactttgtctaaaaaaaagaaaagaaaaagacagtgagataatgaaataaaaatgcattataattttaaaatgcagtattaatgcagggtgctattaagtatgagagaagtgaggggcacactgaaatcaagggagaatgagatggaacagaaactttagagtcaaatagacttacatttaaaaagctagattttccccttcaactttttttcctttggacttttcagattgaacaaagttttatctcatctatggcagacgtcttaatgaggtcagtgggaccaatgccactcaatatacattcgccccatggggaaaacctgttactaacatcatacaaacatcataggcttcccctctgaatctccattgcctcctggctcacacacagaggattacatgcccctagttctagaagagacagactccagctacaatttcccctagaaagagtgtcactggcttcaacatcataatgcctcggactcccccagcccctcccccatatgtccagtgaaagcagcaacatgaagagcatgaaaatccccacatgaatatgccaagcgctgggaggcaggggaaatctggtagtttgtgatagtggaaaggggtcactacattgcggtgggatggcgagatttaaactgtccttttatgacagaatgactttctgagggctggccatttgagatcctacagccggatgagtagagacactaatatattgtgagggagggcagggagtgtgacccttttatctaaataaactttattgtgtgcttacatgtgccagacactgctctaggaactgttcatgccttgtctccaaacactgccttaaagcagggctgccagataaaatacagttacatttgaacttgatgcccggttacatttgaatttcagtgaaaaatatttgggagatacatgctaaaaaattctgttttctttttctttgttttgttttgttttgttttttgagatggagttttgcttttgttgcccaggctggagtgcaatggcgcaatggcagctcaccgcaacctctgccttccgggttcaaacgattctcctgcctcagcttcccgagtatctgggattacaggcgccggccactacgcccagctaatttttgtattttcagtaaagacggggtttctccatgttggtcaggctggtcccgaactcctgatctcaggtgatccgcccgcctcggcctcccaaagtgctgggattacaggcaggagccacagcgcccggcccttgttttcttttttaactgacatccaaacttaattgggtgtcctccattttaatttgctaaataaaatgtggcaatactacttaaagctactatcattccccttcctccaggtgaggaaatgccccaccacacagccagaatgtggcagggcgaagagtcagactccagacatgtgctgagccattatgccattgtcccgcctggccgtgctgggatgtgcatgggacgctctggcctttgtgacagaggccttgcatcagcggtttgcaagcatggccggctctttacggttctacggggtccccatgcagcccttcataaaggcaacgcttgagttccaccaggccggaagaagccatgaaacaaaagctatgagaaggccgggcgcggtggctcacgcctgtaatcccagcactttgggaggccgaggcgggcggatcacctgaggtcaggagttcaagaccagcctggccaacatggcgaaaccccttctctactacaaaaattagcccggcatggtggcgcgtgcctgtcatccaagctacaaagtaggctgaggcaggagaatcgcttgaacccgggaggcggaggctgcagtgagccgagatcgcgccactgcactccagcctgggcaacagaggcgactctgtctcaaaaataacacacacacacacacacacacacacacacacggaaaacacggccctggactccgtgtatagaacctggtgtctcagggcgttgggcaggagcagaggcaggtgtctaagccggaccattggctcccttccgcgccagcccggtgtgctatgagaaccttgttgccgcctagctgaagctgggaaaagcagccgccgcactttggcgagaaagcacgcggaacccaccgaacgcgcatgcgtgcaagccagggcggggctagggcgcgcgcgcaaaggaggggctctaccatccgcggagccacgccctccgtcacatcccacctccccgcccaggagcttccgcgaggctcgcccggcagctcctgctccacagcaggcttcctactttgacgcctcacgcgctcttcagctctctttttctgtgggtctcgcggctctccccctctacaattacgagtagtgccttgagccgggcgttcggagacccacacaggagggacaggatggggagagcggcattaaagggtggtgactcaggagttcaagaccagcctggccaacatgacgaaaccccgtctctaccaaaaatacaaaaattagccaggcatgatggcggacgcctgtaatcccacctactcgggcggctgaggcaggagaatcgcttgaacccgggaggcggaggttgcagtgaggcgagatagcgccactacactccagcctgggcgacagagcgagactccgtctcaaaataaaaataaaaaaaaaataaaggcggggtggtggtggtgacaagcccctattacggccttagtgcgggattccccttggggcgggagacgtcgtccttccgggtgcgggtgcggactgcaagtcctatcggggaccgcgacaccggactgcatccgccagcgtccagggcgtagcgccccccaggcgctgccttcgtccatctctacggggagtggcggccagaagactgggttttccccgtgcagctgtgccccacgttggggaaactgacttttcaggtaagatcccttccaagttccatggatttcgcctttccctttaacctgttccccagcgtcctctggtgatagcagatgagggtggtgacaggaatactaaagttccccatctgcctcgtgttggaagtctccatggtgttcacctccccaatgttgcctgcaagtagataggagcagagatggtacttggggaggtgaccggaactatggctcctaacatacagggcgttgggaactacggctcctaacatacaactctcagtttgccccgtctgtagctccctgtatttcgtctctccctccccctcaaagttcccaaagagaaaaggtggaggcgacaggtggattgcagctctcaggagatcctgtgggaagagggagccttcccagcaggcgccaggcggtggcttccgctccctaagtagccaagctgcaccctggcccgcatgtggctggagaaaagtgcactgccaccctgctcccgctttcaagttataaccacgaacctcaagtagttcttagtgctcccccgcagacacactgtttagggttttgttgtgtttttagtccactcactgccaaacacaacttttcaaaccgaccgcacactcccattgcctccctctaggctaataagtgcttcttcactgagaaaaccaaagctatcagatgagattctctacagactcccagcaccatgcctacctatctgcatctctgctcatatacactgcctctcctctcttgccgcaaatgaactaaccatgttcttatctaaagtccattcagcaattaggcactagattccacccccttttatctgtccagtttttgtttgtttgtttagacggagtcttgctctgtagcccaggctggagtgcagtggtgcgatctcggctcactgcaacctctgcttcccgggttcaggtgatccttccacctcagcctcctgagtagctgggactacaggcatgtgccaccacacccagctaacttttgtatttttagtagaaacgtggtttcaccatgttggccaggctggtctcaaactcctgacctcaagtggtccacctgcctcggcctcccaaagtgctaggattacaggtgtgagccagcgtgcccagccaaaagcaggagctctgtccagttcttgactccagcaattccctcaccttgaaaacaaacaacgcacacacgctcgcgcgcacacacacacacacacacacacgttaaaaaattcccctactcccatcaaccactgctccattccaggcagaactcatagaaagtattatctatatttcctgcctctaatttctcttttcttgtcctctattgaacccattccaattacacttcagcatctgtcactaccagaactgtccttgtcaaggttaccaacaatcatcttgctaaatttaatggttgactttcgattgttattctacctgacctgttggcagcacttaacacaaataatcaccccctcctccttaatacactttcttcacttagtttccttgacatcacgcattcttggttttctttctacctcattagcctctccttctccatcttctgtactgattcttccacttttctttaacctgttaatattgatgctcctccgaactcaatctttgttcctcttccttatccacactcccttggtcatctcatccagtctcatggctttaggtatcttctcatctggggttcataatatggccccttgttacttttttttttttttgagacacagtcttcactctgtcacccaggctggagtgcagtggtgcaatctcagctcaacgcaacctcctcctcccaggttcaagcaattctgcctcagcctcccaagtagctgagattacaagcgcccgccaccacgcctggctaatttttgtattttcagtagagacggggtttcaccatgttggccacatgggtctcgaacccctgaccttcagtgatccgcccgcctcggcttcccaaagtgctgggattaccggtgttagccatcgcgcccagcctactttctgatctcattttctgttactctcctcttcactcaatttgctgcaggtatactggcgtttttgctgttcttccaacctgccaggcacctcattggtatcaatgtttgccacatttataactccagctcatacctttcccctcaactccagagtcatatatccaattgcctattagacaaagtaaacatctaataggcctcttaatctcaatttgtccaaaactgaatttatgagttcctaatcttccttccggtatccacttccttgttaatctgccccaacacgattgtacctccagccttccaactgttcaagccaaaaaaccctgaagtcatcattaactcttccttttcgctcatacccacacccagtcttatcagtaaatccttatggctcatcctccaaatagatccagatctgcccaatagtcctctttcccctagattactgtagcagactcttcattcattccgctgcttccactccccttccctggatttctgcctacctcactgcaatctagtctctacatagcaatcaaagtgctttttaaaaatgtaagactgcaacactcctcggctcaaactctcccatggtttccatctcttgcagagtaaaagccaagaccttaaaatggttccaaagtcccaacataatctggccccgttactccaggaacactggcctttttgctgttttccaaacctgccaggtaccttattgccattgttttgccattgtagataagcgtatttatttatttattttatatatatattttttgagacagagtttcgttcttgttgcccaggctggcgtgtaatggtgcagtctcagttcactgcaacctctgcctccggggttcaagcgattctcctgcctcagcctcccaagtagctgggattccaggcatgcgccaccacgcccggctaattttgtatttttagtagagacggggtttctccatgttggtcaagctggtctcgaactcccaacctcatgtgatctgcccgcctcggcctcccaaagtgctgggattacaggcatgagccacggcgcccagccatagataagcttttgatttgcttgtaaccaataaaaaatgtttttaaaaaaatcagccaggcacaatggcgtacacctgtaatcccagcattgaacccaggaggttgaggtggcagtgagcatgattgactgtgccactgcacttcagcacggatgacagaccaaaaccctgtctcaaaacaaacaaacaaaaaagtctaatctgtaaggagcaggagaaataggatgttttttttttgagacagagtctcgccctgttgcccaggttgtagtgcaatggcgtgacctcggctcactgcaacctctacctcccgagttcaagcgattctcctgcctcagcctcctgagtagctgggattacaggtgcaccccaccacacccggctaattttttgtatctttagtagagacggggtttcaccatgttggccaggctgggttggccaggctggtctcgaactcctgacctcgtgatccacccgcctcagcctcccaaagtgctgggattacaggtgtgagccactgcgcccagctgagaaatagaattttttaaaagtatgtggtatatatttattggtattaaagttttataattagctgaaggttgaagctattgatattaaaggttcagtggctttatatgctatctatttattgtatatgccatttattggaattaaggttctataattagctaaaggttgatagtattgtttagatccttgggatcttttctttctctgattaaatctctcaaccatttatttctctctgcctttctgttaaaatatccaaaagcaggccaggtgtggtggctcacacctgtaatcccagcactttgagaggctgaggcaagtggatcatttgaggtcaggagtatgagaccagcctggccaacatggtgaaaccctgtctctacggaaaatacaaaaattagatgggtgtggctgggcatggtggctcacgcctgtaatcccagctctttgggaggcctaggtgggtggattatgaggttaggagttcgagaccagcctggccaacatagtgaaaccccatctctactaaaaatacaaaaattagccaggcaggatggcaggtgcctgtaatcccagctacttgggaggctgaggcaggagaatcacttgaacctgcgaggcagagattgccgtcagctaagatcacgccactgcaccactccagcctggatgacagagaaagactccatcttaggaaaaaaaaaaaaaaaggtgttacaatttcttattgagtattcaaatttccaacaatctgtttctccttatggttttgtcactttgctatattttaggcaggattgttagctgcctgtttaagattaacatttttccttctgttgtactttttattagatttttctttgtcctttattattttttatgtttttatacatatatcatagttgtacatatttgggggggtacatgtgctatttcgatacctgtaaacaatgtggaactatcaagtcagggtaattgggatacccatcacctcaaacatctgtcatttcttttcttttctttctttttcttttctttctttttgagacagtctcactctgttgcccacgctggagtgcagtggtgcaatctcggctcactgcaacctctgcctccagggttcaagcaattctgcatccacctccacctagtacctgggattacaggcacatgcgccaccatgcctggcttatttttgtatttttagtagagagggggtttcaccatgttggccaggctggtcttgaactcctgacctcaggtgatccacccacctcagcctcccaaagtgctgggattacaggcgtgagccaccttgccaggccgatttgtcttttctttgtgttgaaaacattacagttcttctcttctattttgaaatatataataattgttcactataatttccctactgtactatcgaatattagattctatataactgtagttttgtacacattaaccaaccaacttctctttatgtaccctctctccccttcccttcccagtctttggtaaccaccattttactctgttttatcttgactttaaattttgttttgtgagctagtaggactgctactttaggtgtcttttaattcatatttatgtagcatataattttacttccttttattttcaagctttctttttattttaaatgtattattccttgacaacatattattggaccttggtttttttaatccagtctgaaagtctctgccttttaaagggtaagtttggctggacgtggtggctcatagtggctagccaacatggtgaaaccccgtctctaccaacaatatacaaaaattagccaggtgtggtggtgcatgcctgcagtcccagctactcgggagactgaggtgggagactcccttgaacctggaaggcagaagttgcggtgagctaagatcatgccactgcactccaggctgggtgatgcccagccccctatttatatcttaaatttatcactatttgtaccttctgtgtcagtctcgatccacttaagaaatataaaacacacagtgggctaaacaaaagaaatttaatataaaaagtttttaaattctgatcaaataatgattacaggccgggcgcggtggcttacggcgtaatcccagcactttgggaggctgaggcgggcagatcacctgaggtcaggagttcgagaccagcctggccaacatggtgaaaccccgtctctactaaaaatacaaaaattagttgggcgtggtggcagacacctgtaatcccagtttcttgggagactgaggcaggagaatcacttgaacccgggaggcggaggttgcagtgagccgagatggtgccattgcactccagcccgggtgacagagcaagtctcaaaaaaatatatatatatattacaagctataaggaaactccatatggcaacctaggactaagagagaatactcaaagaaggacaaacttggaaaagggctccctccccaaagctggagttcagacgtaactggagaagacaaagcccattagccaagcaccgtggctcatgcctgcagttccaggtacttaggaggctgaggctgcagtgagccatgatcatgccactgtactccagcctggacaacagagcaagaccatgtctccccctccaaaaaaaataataaggaagaagaagaaaaagaagaaggaggaggaggaggaaggaggaggggggagggaggaaggaggagaagaaggaggagaaaagaagaagaaaagaaggagaagaaggaggagaaaagaaaaggaggaggagaaggaggaggaaagaagaaagaagaagaaggaggaggaggagaaggagaagaaggaggaagaggaggaggggtggggggaggaggaagagggaagcagaaggaagcaggaaaagtttgccagttttcccaggctggagctggtctgcagtttctgaacaaacagaaagcaaccatccagagtgcaggcaaagcacagacaatcagcgacctgtggcatgggtgtgcggaagaagcagagacgtctggggcactggttttccatattaatgcaggaaggtaattgtaaggccacaccaaagctgcaaggtcaccgagacaccagacattctgagaacatggctgtggcagagctctattggatgttctctccccaacacccaccatgcagcagccaggaacagcaggagagccccttcctctgtagcgtccttccagagcccccagttactctcacaaggatctcacattgtgctcactgtagagatgcttaaaggaattctgtccattatggcagagcatatgttaaagggtgaatttggagctgagagacaataattttttttaattttatgtatttctttatttttattttttggagacaagagttttacattgttacccaggctggagtgcaatggtgtgatctcagctcactgcaacctctgcttcccaggtccaagtgattctcctgcctcagcctcctgagtagctgggattacacgtgcccaccacccacctggctaacttttgtatttttagtagagatggggtttcaccatgttggccaggctggtctcaaactcctgacctcaagtgatccacccacctcaacctccaaaagtgctgggattacaggtgtgagccaccgcgccgggtctgagaggcagtaaattgacaacatcatctctaacaggacaagtactttaccatgatcctcatgtccctctgatctcccatccttgtcccctccattcatattgatgttgtccagaattttattttagagttatgaatattctctttatttcattagatcctagccttattagtatagcaataacaaggaacagttaccaaaataattaccaaaataaatcaccctttctttccattttttgtttttttgttgttactgttgttgacacggagtctcactctgtcacccaggctggagtgcagtggtgtgatctaggcccactgcaacctcagcctcccaggttcaagcgattctcatgcctcagcctcccaagtagctgggattacatgtgctcatcaccacgcccatctaatttttgtctttttagtagagacagggtttcaccatgttagccaagctggtctcgaactcctgacctcaagaaatcagcctgccttggcctcccaaagtgctgggattacaggcatgagtcaccgcgtctggcctcttcccatttttcttgcagcatctgtaggatttctctttctctctgtctctctctctctttttttttttttttggcccttcctccaaaactttttccaaatgggcctctatgtggcaatctttgtgaggcctcgtgagcttgaagttattttttttcaggttttaaaaataactttcattggctgggcacggtggctcatgcctgtaattccagcactttgggagggctgaggcaggtggatcacgaggtcaggagttcgagaccagcctggtcaacatggtgaaaccccgtctctactaaatatacaaaaaattagctggatgtggtgactggcgcctgtagtccgagctactcaggaggctgaggcaaaagaatcacttgaacccgggaggcggaggttgcagtgagccaagatcatgccactgtactccagcctgggcgacagatctagctagactttgtctcaaaataaataaataaataaataaaacttttatttttttaaagttaatgtgtgcattataggaaaccgaaaaacacaagaagcaaagaacaaaatcatccacaatggcaagcactttacagtttgacgtgtccttctaggccctatgtgtgtatagacacatttaattttatgggattgagatcattcagtgtgtatcatgctttttcacacatcatgaatatttatcaattcaaaatccccaagccatttgagtattttgataaccaagaatacactacaccagctcaatctgttagaaaaaatgtaatcctgtctttcttgggacaaaaatttcatagaagacaaaaatggcaacaagcctgtagatgaaagcattggcagagttcgattaaaatactgcattcccttaacgctcaatttaaatgaagttattttttgtaaagtcttcattgattgacaattcagttgtaaatttcttggttcacaattcttccccttcaatattttacttcctggtctgtttgcatccagggttgctacaaagaaatttgatgtcagtttgaaccttgttcctttgcagataatctgatctttctctctagaagcctctctctttcattccctctccttccctttctatatatctatatatccatgtatcagctttctcagcctatttgcatgcacgtgggccaaatatggctattccagcccaatattacacttcctcagttcaagcagccagcagggtttgaccagatgctctcagttttagttccaaattccttgaaaggagaagctgattggcttagcttggatctggtatacactctgggtctaattaaccatgaccaaaaggagggtcatggctgctaggctcactcctctgggggaagggacaaatcttatagaagagagaatggtgtggtattgatgattctgtcccttgttcagaggccagatttatacctggctcctgtgcttcctgtccagctactggtatgcagttgtactgagtgatggctcctctgaacatgggtttctgttccctggactcactaactctcacaactttcacttttactccacatcagccacccacaccctggaatgtattactcagaatgatttccctctgaaagtgtatgtatgtatgtatgtatttacttatttatttatttatttatttatttatttatttatttatttattgaggcaaggtctcactctgtcactcaggctggagtgcagtggcatgatcacagttcactgcagcctccaactcctgggctcaggtgatcctcccaccccagcctcctgagtagctgggaccacaaacatgtaccaccacgccaagctagttttgtattttttttttttttgtagagatgggttttgccatgttgcccaggctagtcttgaactcttggactcaagcaatccacctgcctcagcctcccaaagtgctgggattagaggtgtgaaccactgcacccaggcccctctgaaattttaaattcaagcttcccacttcaaaaaatttttttgaaacagtttgtttcccaggctggagtacggtggcacaatcactgctcactgcggcctggacctccgggctcaggcagtcttgcctcagcttcccaaatagctgggactacaggcacgtgccaccacgccccgctaatgtttgtatttttggtagagatggagctttgctgtggcccaagctgatactgaacgcctgggctcaagcaatctgcctgccccggcctcccaaagtgctgcaagcttgtggggaaaagcaagagagatcagattgttactgtgtctgtgtagaaagaagtagacataggagactccattttgttatgtactaagaaaaattcttctgccttgagattctgttaatctatgaccttacccccaaccccgtgctctctgaaacatgtgctgtgtcaactcagagttgaatggattaagggcggtgcaggatgtgctttgttaaacagatgcttgaaggcagcatgctccttaagagtcatcaccactccctaatctcaagtacccagggacacaaaaactgcggaaggccgcagggacctctgcctaggaaagccaggtattgtccaaggtttctccccatgtgatagtctgaaatatggcctcgtgggaagggaaagacctgaccatcccccagcccgacacccgtaaagggtctgtgctgaggaggattagtaaaagaggaaggaatgcctcttgcagttgagacaagaggaaggcatctgtctcctgcctgtccctgggcaatggaatgtctcggtataaaacccgattgtatgctccatctactgagatagggaaaaaccgccttagggctggaggtgggacctgcgggcagcaatactgctttgtaaagcactgagatgtttatgtgtatgcatatctaaaagcacagcacttaatcctttacattgtctatgatgccaagacctttgttcacgtgtttgtctgctgaccctctccccacaattgtcttgtgaccctgacacatccccctctttgagaaacacccacagatgatcaataaatactaagggaactcagaggctggcgggatcctccatatgctgaacgctggttccccgggtccccttatttctttctctatactttgtctctgtgtctttttcttttccaaatctctcgtcccaccttacgagaaacacccacaggtgtgtaggggcaacccacccctacacaagcttccaactttttgaccataaccacaagcgacccttctgtcacagcctcccaagtagatgagactacaggcacatgctaccacacctttctaactaaggtctctccttatccaagtctaaacttgttttgaattgacaacattcactgctcttgcactttgcaggcttcctacactcctggagaatattgtactccttggagatcattgccctacaaaaatcaagtttcttcttactcccttcacactcccagatagtaactttttacttcactctaaaaatagaatgtgggtcagatccagtggctcacacctgtaatcactagcactttgggtggctgaggcaggaggattgcttgaggccaggggtttgagaccagcctggtaaacatggcgagaccctgtctctataaaaatagaaaaacatagccgagcatggtggtgcacgcttgtagtcccagctactcgggaagctgacgtggaaggatcacaggagttcaaggctgtaatgagctatgatcacggcactgcactccagtctgggtgatagagcaagaccctgacaagaaacaaaagaaaagaaaagaaagaaggaaggaagggagggagggagggaaagggcgaagggagaagggaggaaggaaggaaggaaagaaggaaggaagcaaagagagagagacagaaagaaagaaagaaaaagaaaaaagaaagaaaaaggaaagaaaaagaaggagtggcttgggaaaaaatagaatgtattagttgggaacttgcttaacttgtgacaactaaaatgagtgattgaggcataagtctcaaatcatggaggtttattgagccatcttgagaatcagtaaacatgagtcacagaaacatctgtggctgtttggagaatctccaaagagcctacaaagaggttctcaggaggtttagtgtttatacgttttccttaaaggcggaggtgggggaggcccacagtaagacaaatgattacataattgtgagactttagttagtgcccagtaaatctaccttttacataagacaaggtgtacatttgaagaaaaagggaataggaagcatgtctcaggaaggggtgaaggaatcaaaaaggattactcttgtctttgttctgtaccaggtaagataagccagtagtcttttgaaagggctggtttagggccaggtgcggtggctcatgcctgtaatcccaaaaatttgggagggcaacgtgggcagatcacttgagcccaagagtccaagaccagcctgggcaacatggcaaaaccctgtctctactaaagatacaaagaaactagccaggaggctgaggtgggaagatcacctgagccagggaggtcaaggccacagtgatccatgattgtgccactgcccttcaacctgagcaacagagggagaccctgtctcaaaaaatggggggaagcagggagttctgtttagcccttagggaagaaaggctaatgactggtagcgaaggagggggtataacaaggcctctctgatctcccatcttattatggccatgaactcagcttccaaggtttctgtggggttcccttggccaagatggggtccattcagtccattggagactagaattttatttttatttctcatttgtcacagctacaaactttcctatcttttcttattcccccatgaaccctgaaaatttgggacaggtgtcaatttagaaagtttatgttgccaaggttgaggacacgcgcccgtgacacagcctcaggaagttctgacgacatgcgcccaaggtgttgaggcacagattggttttatacattttagggagatgaaacatcaattaatatatgtaagaagtacactggttctggctgggcgcggtggctcatgcctgtaatcccagcactttgggaggctaaggcgggtgtatcacctgaggtcaggagttcaagaccagcctggccaagatggtgaaaccccgtctctactaaaaatacaaaaattagccaggtgcggtggcgggcgtctgtaatctactcgggaggctaaggcaggagaatcgcttgaacctgggaggtggaggttgcagtgagccaagatggcaccacggcactccagcctgggtgacagagtgagactctgtctcaaaaaaaaaaaaaaaaaaagtacattggttccctccagaaagacgggaacaactcaagcagggaggggacttccaggtcacaggtaggtgagagacaaatggcattcttttgagtttctgatacgcctttttaaaggaggcaatcagaatatgcatctatctcagtaagcaaagggatgactttgaatagaatgggaggcaggtttgccctgaggagttcccagcttgaattttccctttagcttagtgattttgggggcccaagattttttcctttcacacccctcactacgctggaaaggtacatccctgtccccttgtctaaagctaattcttccacctggagtctggaccccattctctcttgctttatcagggacctggcttatcccagtattcccctgttcatcctacgccttcaagcttaccatctccatgatttggccacgtcagcatgacaaacatgacagagcaggagtatcaccaccttggccaagcactgtcgttttaagtttaccttgattaaaaactgcctaaatccaaagggcatcagcctaatggctaaggtcagcatgaccataaaccacaaataacatctccgaccagacacattccagactcctccctgaccagagacatgccagccccaagataacctccctgccagctggagagatgtcagccccaagataaccttccctccaactagagacattccaaccccaccataaacttctccccgacacagaaacattccaagctctctcaccaataaacacttagtctgtaatagagcacgctcctgactgaaatcagccagaagcccctctcaggtttattgctccaaaataaacctgtcttgactgttgagtgcttttcatgtttcttccctctctctttatttaactctttgtagagttaaggaaagtgctttaactttctttgcttaagtgcttaagtatctcctgttgacaaaaagagtcaaactctgtaaaatatttgcagagatttattctgagccagatacagtgaccatggccagtgttacagcctcaggaggtcctgacaacatgcacccaaggtgcccgggctgcagcttgattttatacattttagggagacataaggcatcaatcaatacatacaagatgtagattggtttgatttgggaagactggacaactggaagtggggtgtgtccaggtcataggtggattcaaaattttctaaatggcagttggttgactttatctaggctgggcatggtggctcacgcctgtaatcccagcactttggaaggccgaggtgggtgaatcacctgaggtcaggagttcgagaccagcctgaccagtatggtgaaacccagtctctactaaaaatacaaacattagctgggtgtggtggtaagcacctataaccccagctacttgggaggctgaggctagagaattgcttgaacctgggaggtggaggttgtagtgagccgagattgcaccactgcactccagcctgggtgatagagggagactctatctcaaaaaaaaaaaaaaaaaaaaaaaaaaaaaagacctggaatcaatagaaggagtgtctgggttaagataaggggttgtggagaccaaggttcttactatgcagatgaagtgtccaggtagcaggtttcagaggtaatagattatacatgtttattatgagacttagaaaggtgccagactcttagttaattctctcattctctcctggatcaggaaaaagacctgaaaagggaaggggattctctacaaatgttgattttccccacaagagtcagctttgcagggccatttcaaaatgtgtcaaagaaatatattttggaacaaaatacttccatttctttcagggcctcctatctgtcatgttggtatcttattgctacaaaaagtatgttttctcagtcttaaggtctctgtttcactgttcatgctggtcggctgtgcctgaattccaaagggaagaaggtataatgagacatgtccaaccacccattcccatcattgccggaactagtgtttcaggtttaccttagaatgcccttggccaagaggaggggtccattcagttgtttggggtgcttagagttttatttttggtttccactcccatattgaaatcttctcacctggccgggcatggtgcctcacacctataattccaacactttgggaggctgaggtgggcagatcacctgaggtcaggagtttgagactagtctgaccaacatggtaaaatcccgtctctactaaaaatacaaaaattagcctggcatggtggtgcatgcctgtaatcccagttacttggtaggctgaggcaggagaattgcttgaacctgggaggtggaggttgcagtgagccaagatcacaccactggactccagcctgggtgacagagtgagagtccatctcaaaaaaaaaaaaaaaaaaattctccccacctgaccttatgggctgctgctttctctcctcctcccacttcctggtcaatcgagtttaaattgtcttttcttcttaccatccatggtgagaaggtgtgttagtgaagcagccttgtagtctggagtaacacccaaggttccttgtctcacagccacaggaacaagaatgcagacacacaaagagtgaggttgagagtggaagtttactaagcgaaagaaagaaaatagctctctgctgcagagaggggtcctggaaaaatgggttgcccaatccatagtgaaacgcaggggttttataggtgatctggtgagaagatggtgtctgatttacatagggcatgaaaaactgattggatcaggtgtgccattggcataggcgtgaatcttcggtaaccccagcctgatcttttatcatgcaggtgggttctctgcctagactgtgctatgttgcccatttctttattgctgtacaggtggtaacaaaaaaagggaagatggagcctccatgttggacatgcctggccccatatagcccttttctgttggccctgctgctggcattcccccatgcaagcttctagcttccttatttatgtttgcagctcgatttttcaagctgctctttgtttagaaaagaaatgatttgggggctgctttttgttagaaaagaaattctgccgaggactcttttgccttcactacctccctaaataatttctttctacctccggtatcgttaggacttggggaatgtatctgagtcatggggcactcttccacccattacagtctagcttcaaccctcattactcactgaattggctttggtcaaggtcgtcacaatctccttgttgctaaatccagtgaagccccatcagtccttttctctgcagtagctgaccctactggccactctctccttgaagcactcctcttcctttggcttctctagtcctacactttctgattgttcttcagcctctctagcctttccctcaaagtctctgtcaatgctccgtgattatttttgtgtttctgctggtttggtttcctgagcacaggagaacttgcttagatgtgctagaaaatgtttccttttctccagacccgtttgatcgtcacatgccaatggtgttaaacttggagccgtctgctcccattcaaaggataataaaactggccaggcgcagtggctcacgtctgtaattccaacactttgggaggccgaggcaggtggatcattgggtcaggagattgagaccatcctggctaacacggtgaaaccccatctctactaaaaaaatacaaaaaaattagccaggtgcggtggcgggtgcctgtagtcccagctacttgggaggctgaggcaggagaatggcgtgaacctgggaggtggagcttgcagtgagccgattgtgctactgcactccagcctgggcgacagagcaaggataataaaacttatcttggctgagtgtggtagctcttgcctgtaatctcggcactttgggaggccaaggcagtcagactgcttgagtccaggagttcaagagcagactgggcaacatgctgaaaacccatctctacaaaaaaatgcaaaaattagccaggcatgatggtgcatgcctgtagtcccagctacttgggaggctgaagtaggtgtgttagcactttagggaatgtatctgagacacacagcaacaaaatatgttagtggtggtgaatccatagggtctgtagcaacctcaattcttgcctcctcagaagaattcgaccgaggggcataaggcagggtgagagactgaggcacattgtaaaggagaagtgaaaattaattaaaaagctttaaaggctgggtgcagtggctcacacctgtaatcccagcactttgggaggccaaggagggcagatcatgagatcaagagattgagaccagcctggccaacatggtgaaaccctgtctctactaaaaataaaaaaattagccgggcgtggtggcacgtgcctgtagtcccagctactcaggaggctgaggcagcagaatcacctgaactcgggaggcggaggttgcagtgagccgaaatcgtgccactgcactccagcctgggcaacagagtgagactccgtctcaaaaaaaaaaaaaaaaaaaaggctttagagctggaaagaaaggaaataaaatacacttggaggaggtccaagcaggtggagatcaggtgtgtggtttaaccctggacttgggattttatacggacttggaggtttatccattgatatgcttctggggggtggcattccttccctgattctttccttggggtgggctgtccacttgtggccagcacttgggagggggtgcatgcgcagtgtgtttaccgaagatgtacacatgcccacttgaagcattcttcccttactagtcaagtgttcttagaagaaggtcatataccagttaaacacagccattttgcctcttagtgcacatgcttgagcccacttgcccaagtcctaagatcttatagggaagctgctgatcagcagttccaggagttttctatctattgggatactgcctttccctggtgccgactgtgaccaattattattttagagagatttttggggcagggcacaggggacacggactagctacctactataacaggtggatcctttgagcccagggaggttgaggttgcagtgagctgtgagtgcaccactgaaatccagcctaggtgacagagtgagaccctgtctcaaaagacaacaacaacaggccgggcgtggtggctcacacctgtaatcccagcactttgggaggccgaagtgggtggatcacaaggtcaagagattgagaccatcctggtcaacatggtgaaaccccgtctctactaaaaatacaaaaattagccaggcgtggtggcacgtgcctgtagtcctagctactcgggaggctgaggcaggagaatcgcttcaactcaggaggtggaggtttcagtgagccgagatcatgccactgcactccagcctagcaacagagtgagactccctcttaaaaaacaacaacaacaaacaaacaaaaacttatttcagggagaaatgcttgcattccaaggtagggactctccgttctcttcctgagagaatttattcacattccaaagcacttgtttacactagggagatcagttttctctccctctctcaggagggctgtgaagcacgtgggcagcacgtagtctacataaactgtcaggtttacactttcagggtttgtcccctgtgaggcaagaaactctgttgtatggtcatggtccatctggctcctgccatgtcacctgtagggtactggacatgggaaactgatgcagttcttgctgtgtgtaataatattgtctgatttctgagctagaaaccccatgtttgttttttaacaggaaaaaatttaattgggaggtcattgggctgagacagatccagtgatttgggttcctacataagcaacctgaagcccaatgtaaacagtaaaacaaaactagagacttaaccagtcagaaactgctaactgtaaaccaaaaattaaaacctaagctcccccaccaaccaactgaaaggaactcctccaggccaaggagaccccagagaaacctgaaaacctgaattcctggccatgacaggaagggagattggacacgcctgatcctatgccctgcccccacttttttggagtttaggcacaattgaccagaattgaggttaaaatagagatcctaagactgaaaaatacagactttgtgacaataagatacaaaatttcaacctaactctgatatagcatcacatgacagccgaccctgaaggaaataaaaatattttaccccaaaatatatttcttttatatattttaaatggtcctggccaggtgcagtggctcacgcctgtaatcccaacactttgggaggccgaggcaggtggatcacctgaggtcaggagtttgagaccagtctggctaacatgtgaaacctggtctctactaaaaatacaaaaattagcggggcgtggtggtgtgtgcctgtaatcccagctacttggaggctgaggcaagagaatcacctgaacccaggaggtggaggttgtggtgagcccagacagcaccactgcactccagcctgggtgacagagcgagactcttgtctcaaaaaaaacaaaaaacaaacaaacaacccccctcccaaaaaaaaaaaaaatgattttcttcatagagttgacattctggtggggagagaagagcattaaataaatatatgtcaattgctaagtactacagagaaaaatagagccaagtaaggagaatggagaatgccagggggggaagggaaggcctctctgataaagcagtatttcagtagcgatctggaggaagtgaagagtgaaccatatgtttattttggggaagaacattccaggaaaaggaacagcaagtgccaaggccctgaggggggattgcacttgacatatttgagcatggttgctggagctgggtgagaggaaaagtgataagacatgtactcagagaggtgaggggaggggctcggctgcaaatcatgtcagccttttaggccattgtaaggactttggcctgtcctcttagtgaagagccactggaggattttgaacaaagggaatggcatgatccaaagtttgttttttatttttttaattttcattttttacaaacagggtctcagtctgttgcccagactggagtgcagtggtttaatcataggtcactgcagtgttgacctcctgggctcaagcgatcctcctatctcagcctcccaagtagctgggaccacaggcggtgccatcatacccaactaatctttttctttttttgtagagacagggtctcactatgttgcccaggctggtctcaaactcctggcctcaagcaatcttcccacctcagcctctcaaagtctgggattacagctgtgagcagggaaagtgctgggattacaggtgtgagccactgcgcccagcctgatgtttgttttcaaaggatccttctggttgttgcatggagaatagaatatgagaggtctagggcaggagcagtgagatgaatgagttcattataataatccaaataagagatggtagcttggccagtaaagccagataggacctcctgtggggtataagtgaaaggaaggaatcaagaatgatttcaagtggcttgagtaaatggaagaacataaattgccatttgttgagaatgggaagaactggaggagtaacagttgtggaaagatgaaattaggatgttactggacacagtggcccacgcatgtaatcctagaactttgggaggccaaggtgggatgatcacttgagtgcaagaatttgagaccagcctgagctacatagagagaccctgtctctaaaaaaatgtttaaagcttagccaggtgtgaaggcctgtgcctgtagtcccagctacttgggaggctgagacaggagaattgattgaacctgggaggcggaggtggcagtaagctgagattacgtcattgcatccagcctggacgacagagtgagactccctctcaaaaaaaaaaaaaaaagttactgttgtcaattttatgttttatatatttaccacaatttaaaatggcaatattatacaaggcaaataaaggttgtagaaatgttccagattaaaggacataaaatagacatgataactaaatgcaatcaatatctgactctagattggttctttgtttgcttagagatggggtctcattatgttgaccaggctggttttgaactcctggcctcaagcaatcctcttgtctcagtatcacaaagtgctaggattacaggcatgagccactgtgcccagcctaggtttgctcttacaatggaagggaaggaatgctttagactgggcatggtggctcacgcctgtaatcccagcactttgggaggccaaagtgggtggatcacctgaggtcaggagttcgagaccagcctggccaacatggtgaaaccccgtctctattaaaaatacaaaaattagctgggtgtggtggtgggcacctgtaatcccagctacttgggaggctgaggcaggaaaatcgcttgaacccgggaggcagaggttacagtgagttgagatcgcatcactgcactccagcctggacgacaagagcgaaactccatctcaaaaaaaaaaaagaatgatttaaaggacattattaggacaactgacagaatgggattatggatgtaaagtattgcaaatgtatgaagttgataactgtacaacaattatataagagaatatccctatccttaggaagtacatactgaagtgttctatgtaacttgccctcaaatattccagataaatattaaattgtttatgtgtatgtgtgtggagagacagaataagcaaatgaggtaatattttaacaataatctgaataaagggcatagagttttattgcattgttttattttttcgattttttgggaatttgaaataatttctaaataatgttctaaagttcaagctgggcatggtggcacacacctgtagccccagctactcaggaggctgaaatgggaggatcacctgagcagaggaggttgaggctgcagtgggccatgatcatgccactgcacttcagccagggagagagagagactctgtctcaaaataaaataagttcaaaaacaaacaaaaaccccagtgagcctgttccttttgttccattctctttttttcttttgagacggagtcttgctctgtcatcagactagagtgctgtggcatgatctccactcactgcaacctccaactccctggttcaagtgattctcctgcctcagcctcccaagtagctgggattgcaggcacgtaccaccatgcccagataatttttgtatttttagtacagatggggtttcaccatgttggccaggatagtctcgatctcctgacctcatgatccgcccgcctcggcctcccaaagtgctgggattacaggcatgagccaccacgcccggccccattctctcttaaacccactctaatcaaaccacctatcccacaactccactgaaatgcatttgtcaaggttaccaaatatacccatttgccaactccaatggtgacttctctcactctttctcttacttgacccatcagtatttgacatagtttatcactccctccttcttgaaatgtgtgcatcttttcacttctgaacaccacttttttggtttttctcttacattcctggccgctccttctaaatatccttgacagttccccttccaaacactggagtgcccagggctcagtcctcagagccaacctatctaggagtttctgtacaccctcagggtcatttcccaatctcaatctagtgtcttttttttttttttttttttttttttttttgagatggagtcttgctctgtcacccaggctggagtgcagtggcgtgatcttggctcactgcaagctccgcctcctgggttcacgccattctcgtgcctcagcctcccaagtagctgggactacaggcgcccgccacgacgcccggctaattttttgtattttttgtagagacggggtttcaccatgttagccaggatggtctcaatctcctgacctcatgatccacccgcctttgcctcccaaattgctgggattacaggtgtgagccactgtgcctggcctcaatctagtgtctttattcactcaccttagtctgtgcaaatcatattcttccagaaatgtaagatcctcctcccattgaggtcttactcaaggccaaactccctgtcacctaaatcctggttcaaagcagttggcggctgtacatggtaggaaaagtttctcatactatcctgagcacgcatgctgggagaaagatgggaggctggaagccccttctaatatgctggagagatctgaaatgcaattctcccttcaaaaatcagaaaactagggcccagtaaggccattacttgttgaaggtcattcagctgcttattggcaatgtctgagctaaagccctgtgctgtctccttaagtgttgatttcatgtatttgtgtcaggagcctccttaagaatctgataaaagctgcagactttttctcagcagaaaaaagcacttaacacatgccaacaacttttttttttcatttaatttgaagagtttcatggactctcaaagtacatctagacctcagattatagaaaccctgctctatcagaacaatccaaagcatggagaagtctacagcactactgatttagtaccctccacaaatcaatggtgtgaaaaagctggggacaggactgtaaatgttcaagattaaaagagtcttaggaagcataacaatcaaatgcagtatataggccttatttaattttttttctttttttttgagatggagtctcgctctgtcacccaggatggagtgcagtggcacaatctcggctcattacaacctccacctcccaggttcaagtgattttcctgcctcagcctcccaagtagctggaactacaggcacgtgccaccacgcctggctaatttttgtattttttctagagtcagggcttcaccatattggtcaggctgatcttgaactcctgacctcgtgatccacccacctccgcctcccaaagtgctgggattacaggtgtgagccaccactcccagactcaattttttgttttttagagacaaagtcttgctatcacttaggctggagtgcagtgacacaatcatagctcactatagccttgaactcctgggctcaagtaatcctcccaccacagccacctgagtagctgggactacaggcgcacaccaccacacatggctaattttttgtttgtttgtttgtttgttttgaggtggagtcttgctcattctatctcccaggctggagtgcagtggtgcactcttggctcactgcaacctctgcctctcaggttaaagagattctcctgcctcactttcccaagtagttgggattataggtatgcaccaccactcctggctgatttttgtattttttagtagagaggaggtttcactatgttggccaggctggtctcaaactcctgagctcaagtgatctgcccatctccacatcccaaagtgctggtattacaggcatgtgcctggctatataatatatatatattatatatattatataatatatataatatatatatataatatatataatatatataatatatatataatatatatatattatatatataatatatattatatatatattatatatatattatatatatatatatatatagagagagagagagagagagagagatagggtcacactcttatttgaattctgattcaaacaaactaagtataaaaggacatttagggagccacgcatggcggcatgcaccaatgatcccagctactctggaggctgaggtgggaggatcccttgagtccaggagttcaaggtcagcctgagaaatatagcaagaacccatctctaaaaaatgaaaaaaaaaaaaaaaaaaaaaaaaacattttggggaggggaacaaccacggaaatttgcatagactgagtattggatgatattaaggaattattttgttacatttgaaaatcattatatagaaaaatgttattttttagagctgaaatatcaaagtatttagggttgaaatatgatgtctaggatttactttaaaatacttcaacaaagaaaaaaatagatgaagcaattttggcaaaatgttaacaattaattataggcgatagggagctgggagttcattataatactcttctacttttgtgattgaaatttttcataaaaacacaaacaactgttctttgacattctggcaaagacaggaagatatctgggttgtcacagtcagtacccaaattctgagtgtccctgaagagtcattcatagactttctgactctaccaccacagactatctgctgggttttgtttctttttaccagaggactcactaatatcctgactctagactagctcctacaatgaaagagaaagatctactataaaggacattattaagtcaactgacaaaattggaatatggatggtagatttataaatgaatcagataggtattgttattctctttctggatctttcaaggaatttatccatttcatctgcgttgtcaaatgtatggacatagagttgttcatagcagtctcttatctttgtaaatatctgtaggatctgtagtgatggctcctctttcatgcctcatatttgtgatttgtgcactatcctttttttgacacagacaaacagaggccaaaaggagaaatgactcaggtcaagactgcagagccagctgggctatccttaactcctgctgccttgcctggctgtcaggtgaatcatcctttttgagtcttcctgctcccagcccacagctctcacatatcctttttttaatttttattttattattattatttttttgagatggagtctcgctctgtcgcccaggctggatggagtgcagtggcatgatcttggctcactgcaacctctgcctcctaggttcaagcaattctcctgcctcagcctcccaagtagctgagactataggcacatgccaccacacctggctattttttttttctgtattttagtagagatggagtttcaccatgttgctcaggctggtcttgaacccctgagcttaggcattccgcctgccttggcctcccaaagtgctaggattacaggcgtgagccaccatgcctggtcagctctcacctattctgcgtggcctgacgtgtagtctgccatggaagagcccaactgtagagcaaggacactcattgcccttggcctctgaggtgaatctaacttctcagaatgttctcttgccctctatcctctgcttcccctcaaaagaaaaaagaggtagaggaggtaagataataaaagagagattggggtggggagtggcaaatggtaaagatggactactttttagaagcagcagtaagcctcagcgtgcctggaaagaggcagttctgccgtggcagggagaggagatcagggaaaaacagtgacaactttactgcccccttttttttttttaagatgaagtctccgctctgtcacccaggctggagtgcagtggcatgatcttggctcaccgcaacctctgcctcctgggttcaagcaattcctctgcctcagcctcctgagtagctgggattacagacacaccaccatgcccaactaagttttttgtatttttgtaagagacaggttttcaccatgatggtcaggctggtcctgaactcctggcctcaagtgatccacttcaacgtcccaaagtgctgggattacaggcgtgagccaccacacccagcctactccttttgctttaactcttgtctccttaattgctagaaggaaggttcattaagtccctaagtaactgggggggcctaattgagcctacacctagttttccaaattcttattctatcaccctacccaaattccatgtctagatggtagtaaagggaatgaaagacatagggacatcagcttagctcctttttgtttgtttgtttgtttgtttgtttgagacagggccttgttcttgcccaggctggagtgcagtggcacaaccatggctcactgcagtttcaacctcccaggctcaagtgatcttcccacttcagcctcctgagtagctgagactacagcaggcacacatcactgcacctagctaattaaaaaacaggccgggcacagtggctcatgcctgtaatcctggcaccttgggaggctgaggcgggtagatcacaaagtcaggagttagagaccagcctgaccaacatggtgaaacccctgtctctactaaaaacacaaaaattagccgggcatggtggcacgcgcctgtaatcccagctactcaggaggctgaggcaggagaattgcttgaactgagagacggaggttgcagtgagccaagattgtgctcccctgcactccagcctgggtgacagagtgagactccaacccaaaaaaaaaaaaaatttgtagagatggggtttcaccatgttgcccaggctggtctcaaactcctgggctcaaacaatcctcccaccttggcctcccaaagtgctgcgattacaggcgtcagtcaccatgcctagcctaaacttttttttttttttgctttaacttcagatggcctcaccccttagtgccatccagtgatgaagtcaccaggtggaggtggtgctggctaaaactcgaagattattcctttactctgagaatctcctcaacatccaccattcctgctatctggaactcaagtcatcagcatacagaactacaatcagaaaaagagtcagccccactgtaggcccccaaatactaagggacaaaatgttgcatcttctgattctaaagcccattctctttccactatatcaataaccctcaaattcatgccaaatgtacattagtttttgtgtctggtactttccttcttagagtgcttggggaggatggtgggaaggaatgaagaggacaaggacagactcgtctgcctcaatacatccacatagtggacaccactgtcttttgggaagcttccccctctctcaggagtacgtgagtaagttgtttccctggctaccttcctggggaaccaaagtttgcggggaaagaacacatcaaagtgcttgttgcaaagaagaacctcctctttattccacatatagaagctgtgtttccagagctgggaaagggcttcgacctggccctacctctgtgtgggcctagagatgaaggtctagggccgggcgtggtggctcacacctgtaatcccagctacttgggaggctgaggcatgagatttgcttgaacccgggaggcggaggttgcggtgagctgagatcgtgtcattgcactccagcctgggcaataagagtgaaacaccgtctcaaaaaaaaaaaaaagagagagagagagatgaaggtctagatcctggtaattaggcctttctccagttggcaatgaaaagtcccagcctccagtcagtcccaaattagagagtgggagcaacggtgtgtgtcagtgccttggtgagatgaagatcagcttcaggcaggctcttccaggcaagttctaagatcccataccgggcaatgcccacgggaaggatggtgcgcacacagttctgccatgggaggggtaccgcaccctggaactcctgaggacttctaggagtatgagaactgccacaaaacaggcagcagaacagccgttccccgggaactagctctgtggcttttagggcctcttcgtagatgatctcttggggttgaggttcctctctcattagcagctcctgaagcagcttctggattctgggggacttaagttggtacaggtccatgagctggtagaactgttccatccaagcagtgctgtcttttggatatcgctgctgcagcatccgcaaaacatggtacagtgccacaaatgtctcccacaaaggcaactcttccttttttttagaaatgggctgtgtcttcttctctaacttgggcagtttaggaaacctgcgtttatccttaaaatcccagaagtccttttgaaacatcagtgccagggtttgtttttccacagaggcatgggcacttggaaaaatgtctctggtggcaggataaaagtattgcatttccatctccttgtgagcaatggatatctgctgtgccctctcacttctgtaaggttctcctagaagatgccaatttttagcccttgggtctggaatcctcttggtagctaatggggacttttgtgtggggacagccaaaggttttggccagctctccttttcctttgcttttataggaggaatcactttcaggtattttggactcatggactgtctacttgagatccttgtgtcttgtgactccagggcctgtctgtgacggtacacaatggcttcatgtttggccagatgcagccattctaagtttccctttgaggcaaggtctttgagcagctggcacagtctatggaaaccatccctggaaagctgttctcccgcttccattcgttctaggacatggcggatccactctacatctgagaggcttacgtctgcatgttgttccttagctgggatttgggagagaggtaactgtacctcagtctgtcccatcagaggtggatgctgcaaaaaccacttccaccaggcacctagtggtttgtgttggagttcctcagcttccacggtcctccttaatatgtgggacataaatggggtctttaagtcctgtgcttgggactccaaaactgtacccaaaacatgtggaggtatgggttcatattttcccatcacttctctttctttatccattgtccctaagaatttcctgggtatttcaactactgtggcctttttatcttcccaggatatttgtttctccggcactggcactggtgttttctctttcatctccagagctgttgacatcagtttcttcaaagggctttttagaactcctagtcttatagccctgcctttgccatgaggaactcctcttaaaatggaaaggactctttcccttcctcttaggctctttcttctttgttcttgtaacttaaattgtttttctttttttaagatctctttttccctgtccacctcttcttccaatgagcagctctcctcttcctcttcctcgtcactcaaactttctgtctcttcctcactcataatttcttctttctcctcaaacacttcttccttctcctgaacctcctccttcttcttttcctttttcttcttcttcttctcctcctcttctttctccacttgcttctcctccccttcctcctcctccttcctttcctcctcctcctccctttcctcctcctcctccctttcctcttcttcctccctttcctcctcctcctcagaagacaaactctcttgcttttctagttcatctaacaggctttccatttcttcagaaaaatgctcttcactttccacttcatccacttgactggaaaacttttcttttggtttgtcacctctcttggcctctttcctctttctccaccttcgtttaaggaatgggattacctcttcttcttctattcctccttcctcttcatcatccagtatgacttctgaatgctttctggccaatttgctctcttcctcagtcattttttcttctttgtttatcattcttctcattttgttggccagttttctctgcttccgagccagtttcttctcatctttagtcagttctgatcgtttttcagaaaaatcccactctttgatatccagcttactctgttctatactcaacctgcgctccttaacaaagagtgccctcttcatctttgtcatttttatttcttcctgtgttagtttcctttcatccctggttagtttttgaagtgcctttaagattttgttcagttttgctggttccttggaaaggctctccctttttttaatcaacttccttgaagccttggctaactttctttgcccctggacaaatattctctgtcctctagtaaattccagttttcctttggcaatttcgctttcctccatggccaatatcctgtcttcatgtagcagtatcttctcctctagtgacaattttctctcaaatagttcttgttcaacttgagtcattttcctttgtctagaagtttctggagtctctcccttagacagtgtttcttttccctcaaccagtctcatcttctcctcagccagtcttttcatttccaggttcaatgccttttcttccttagcaatatccaactctcctctgagccgtttctttccttggaccattgccttctccagagctaatttcattttttcctgggccaatttctcctgttttttggccaaactatcctctacttggaccaattttttctctgtttcagccagtttctccttcttcttgatcacagtctccttttcctgtgtcagcttctcctctacctgagccagtatcttgttgaacattcccaatttgttctttacttgcactaattgctttttgctgtgggtgagtctttctttattatagagtaggttctctttcctctgagccaatttttccttctcctgggccagattcttcttttcctgagccagattcttcttctggtacagtatcatcttgttctttgtgagttcttccatgctgttgatccatctttcccttttttgggccagtttcatcttcttctcaatcaattgctcccttttccgtcccagtctttcctcttcctcaggcattttttccttgtgctgggccagtttctccttttcctggatcagcaactcttcttcctgggccagttttgtctcttcttcagacagtttctccctttgccaggccaatgcctcctcttcctcagccagtttcttcttttcctcaaccagtttcccctcttcctgattcagttcctcttctttccaagacagttcttccatgtcccattccagttcctccaattcctgggccagctccttttcttgccagtccagattttgttccctctggggcagttcttccactttctgggccaatatgtttttcacctcagccagtttccctcctttctttgctagtttctcttcttctctagccactttctcccatttcttggccagtttcttccttttctgggccaatttctccgcctcctggcttagcttctcccctctttgggccagtgtttcctctttctgggcaaacttaccctctgcctgggccatttccctgtcatcctgggttattttcacgtatgcctgggccagttttctctcttcctgggccaactgtctctcttcttgtgcaagtttctcttcttcttgtgctaatttcctctcttcttgggctcgttttttttcagctcgggctcgtttcctgtgtattctggcccatttgtgttcttcttggatgtgtctctgctcttctgtgacctgctgttctttttcttccccctcccgagacacttcttcctccaaagtcacttcttcctcatccttgtactgttgctccttggacttagatgataacatattttcccagacttgtttccactcctcccatttcagcttcttgtcctcctgaagcatttcctcctccggggatagcttctctccagcctgatgtagtttctcctcttcctgaagaagcctcttctcccattcttccttccatgccttccaggatttccttgtctcaccatggacctgtttccactcatcccaggcctttttccagtcctgccaagatggtgtcctctcaatcataaccagttttccttcttgtttgaccactttctcctctagtgtggccatttcctccacttcctcactcatatccctctcttctttggtcatttccctctttatttttcctacttttctttccttctggacagctttcctcccttgcttaggtgacttctgaaaggttttcttctcttctttctttgatatttcttttcccatggttacattacctggttctaaaaaaataactttcttgccctttttcaaaatcacttgggtttcctccaagcccagcatgtctcttgctttcttttgtgcttgttcttcttcccttggcatcacttccttgtgtctgatcacctcttgggtcacaccttgtatcatgtcctctctaattgctccttcctggataaaaattggtttcttctctggcgggactacatcccaatcaaggtcctcaagcagaaccttactttctttcttcaatagggggcagatctcctgaaagagttcccagctggggtgcctatctaccagcatctcctgagcaaatgtcactagctcagcgtttaggttttctgacatttttgtttgggaaccagatatcctcagggccataagacgacatagatcgtccctccatgatgagccatctccagcggttgacctgcggccagatattccagaggctccccgcccttggattttaacctttttagtaactggctgttccattacaggaggtgtagtttcctcatttataactttggcttcttttcccttctttttgtgcttctttttgagtttctgagctgttgctttcttgtctcttttgtcacgtattttctgcagcctcttcagggtcaatgcaatgtgatccttcgagatatctttctcttgagaatcaacatcttttgagagctttattacactggtgcttgaagaccattgggaatagacggatgcttcctccatctcaattggtgcggcctcagtcccactttcatcctctaagaggcctggctctgtgctcatctgtttagagtctctctctttcgtcttcttgagaccccgcaaccatttttggcctgcagtaaaaatcgagagatggaggtaagcaaagtatgggaagcgacatgaaacccttcccaatattaggtgtgagctaagaagaactgtcatataagaagtaacaacagagagaactgaggccttaaaaaaaaaaagcattctctttgctttattcctagccccctactcctgccaaatcctagagagctaggccttagagtcttcctgagtttgagtggatccttccttagaaagtctttttttttcattgctttcataaaaatcaattttactgaggtataatttaaacaggatatacccattttaagcaaacagtttgatgagtttgaaaaatgtatacacttttgtaattactgcaatcacaatcaggatataaggcatttctattatccccctaaattccctcctatatagtgtcccagtcaacatctatctacccttaacctctggccctaggcaaccactgatctgctttctgtgactgtagattcatttgccttttttaggattccaaataaatagaatcattaaaaaatgtgctcttttgtgtttgctttctttcaatagtttttgagattcttccatgttgttgcatgtatcactcttttttatcacagtagtatttcagtttatgaatacactataatttccttatctatacatttttttaaaaaattatactttaagttctgggatacatgtgcaaaacgtgcaggtttgttacataggtatacaggtgccatggtggtttgctgcacccatcaacccagcatcatctacattaggtatttctcctaatgctagccctcccttagtccctcacccgagagtgtcttttctatgatgagatctttccacttatctctcttcccacctggtatctctctttttttttttttttgagatggagtttcgctctgtcacccaggctggagtgcagtggcaccatctctgctcattgcaacctccacctcctgggttcaagtgattctcccacctcagcctcccaaatagctgggattacaggcacccaccatcatgcctggctaatttttgtatttttagtagagacggggtttcaccatgttggccgggctggtctcgagctcctgacctcaagtgatctgcccacctcagcgtcccagtgctggaattacaggcatgagccatcatgtcccgccagcccacctagtatctcttgatccactttaaccctaactaccctgcctcttggggaccctgaggcacagaccagattaccccttacatactatgctttttgacccctgcttggcctcgtctttggcctttgctgggcttgatggccacttcagattcttcagaaactgtaggaggtttcagggaggatttaagttcagaaggcattgagacatctaaagaaaaagccggcttttcatctctatgtgacagggtcaggttttcattcaatctctgctccacttgagtggaaaggatttggagatctgtggcccgcatccccagtagatggtccaggggttcctccccgatcatctgctgcctatgaaagtcaaaggagaagaaggactatgctgagtcaggaacaaaagggagaatgggaagcaaaaaacggttgtggaacaggcaggaggcttggcaaagtggccaagagagatggcatatgcagaggaaaataatggctgagacaaaagaaactatctaggaagccaaggtggcaatgaatggagtgatctgtattggaggctgtagaagcaggagaaaaggatgaaaatggaacttgaagaagtagcggacacataggaaaagcaatggagaaaggagtgagcaggccaggtatggtggctcatgcctgtactcctagcactttgggaagccaaggtggcaggaagatttcttgagcccaggagttcgagaccagcctgggcaatatagtgagactctgtctctacaaacaattagccagtgtggtggtgcatgcttgtagccccagctactcagaaggctacggcaggaggattgcttgagcctgggaagcagaggttgtagtgagccaagatcgcgccactacactccagcctgggcaacagagtaagaccctgtctcaaaaaaagaaggaagaggaggaggaagaggagtgaacagtcgggattgtcaaggatagtcatctaggcgtgagcaaaggctatgagaaagaagaaacatcagggagaattaatgaacagggatgaagaaatagcaaaggaaaggagggggaaaatggcgaatggggtgaagaattgaaggaagcacaaacttactgcatctcccgaaaagtctcttgtttttgggtcagctgtaagagtgaggtcctagagtggattccaatctcagccatgaggcttagggtcttgatcctcactctttcatccttgtccattaatccttgagccagaggcatggcaaaaagatgagtaatcattcctagacgcttcagcccttcccaagctagttctcggatcagcgggttggaattggttgtatcattcagtagccgacgggctgtctcagagcgtagggctggggacacctggtaagaggcaaagatttgccctagtgcaccaacacagcactggtacttcagcaaggaagcatggaccataatattgagcattgtctcaatcatgctattaatggttatttcactcatctttcttcccagccaacttcggtttgctccatctgtaaggacactgtaggttacatccttggaaagtctcatttctaggaagtgttcatcctcctccttattctttggatattctgtattacttatagctcttaccctgctgtgccagaaaaagaattcttgagacctgtcccattccagctcccgctggggtgcatgcaggttgcactgtaggtatattggggtgccctctggccaaagacgggcacgaatcactgaattggggatatagcagtcaggggcaaaaagccattcccgcccatgaccaaagtagtatcgcaatatctgataggggttgagtccatcccagctagtcagttgtagctggggaggaagcacataatggcattggtaacgtttgctcacctgcatccaatcttccatgtcctgcaaagaataatgcatggaggaacgcagtaacactgggctcccttcctcatcttcttctatcacatgtggcacagaatggtcaaaggcaatggcccggttgttgacaagtttctccagacccactaatttctgttgcgcttgtccagggtagatgtacttgggcacaaacatggtctcaaaggagaagaagaagcttggtatgaaaggcttagggacttccagtacttcatctgatatgctcataaaggaaaggcgagtcagcagggctgggggaagcaattttaaacaggacactaggtaaagactctggttaaaagtcacaagcaggtcaccccggtcatttgcaaaacagactgggccaaagtgcagtgatgagtccagaatgcctatgagtctgccatggaagtcccagatccgaacagagccatcggcagaacctgtgacaaaaagactcaaggagaggcagacatcaaaggatgtgatggcacacaggtgcagaggcagtgtttctatgaatttcaagccattctgtgacccagaggacagaaaatcatggaacttccagagacgcaggcagtttgtctctgtgatggcacccacagacttgggcaagagtatcagatgtgttaggtgacagctgctgagaatgctggcgagaggccgcagttgtactttgaccccatcaagcacagcttctgacaggtgcacatagtcatccattccataggaacagagcagagagtttccttggccaccaaaaatccctccagacagcgtggagagtgccagtacagcgccaaagtgcatgaatttttctaatcgagcacagctgtgctgggagagcactcttatcacaccactctggtgcccagagaatatcagtccctctagaccccgccccaagttgaaatgcccataagccaggcattgtacaaagtcctgagaatttggtgaggtgcctaagagatacttggctgggcaagggcagcgggttgtgtcaaataccagaacctctgagctgcctgttgctacaaagagctcctctttacctgggtcgtaggcccaatccacagcctggtccaggattgagaagggccaggtgataaccagaaggtcccctgttactggggacacaaagcgcaacaagccatcctcagtggtacacaggatccggaaccagttatttccacagcagacccgacgcaactgctggggagcagagccacagacattgaagaggctgtagaagcagggcaggcggtgcaaggaaaaactatgggcagtttggcagaagaaagtaatgctgtcaataaactggagccggtatagctcctcaccaagctctagccgccgaagcaggctccctgaagtcaggttccactccttgattaggctgtcactaccagctgttagcagggtgtgggcctctggtcggctgcggatacagatcactcctgattgatgggcctggaaactgtggagtggatggccctgctggaggctccaaacttggatttccccagcttggtttccagcatagagaaagccctgatcaaaacaggtgaagcagcaggtgatggaggagccgctgctggtggacgtgaacctctttacctctcccagctggcccttgccctggtgcataaggaccctcaccaccgtctcacacagggccaggagggagccactgggaccattcagcacgatgtcctggacaagctcatcacctggcatggagaccatgtgggctatttggaggcccgtgccacctagctcaatgacccaggtcaccactgcccccaggatgccagacagaagcatcttcatttccgggtcatagcagaggcagctgatgttgaagcggcagggcactttacccaggggtttgaatgcccgaaagtggtccccaaagagtcgcaggatcaggtcaccacagtagaccacgaggatatgaaaggagcctgcatggaccatggactggatgggtggcaatcgttcagtcatggagaatgttcttttctcaaccatgtcctcagttttgctcttcatccatgctacagcctagaagagaataagaaggaaactgcctaggccgggtgaggtggttcatgcctgtaatcccagcactttgggaggccgaggcgggtggatcacctgaggtcaggagttcgagagcagcctggccaacatggtgaaaccccatctctactaaaaatacaaaaattagctgggtgtggtgtcggtgcctgtaatcccagctactcgagaggctgaggcaggagaatcgcttgaatttgggaggcaaaggctgcagtgagccaagattgcgccactgcactccagcctgcgtgacagagcgagactctgtctcaaaaaaaaaaaaaaaaaaaaaagatgaaactgcctagagctgatggtagggcagaatattcccttatttccccatgttttatgttaaggaggaattggaggactcaagtgattttatcccttggtgatgggaattggaaatacggtagaggcaggaatcctaggacccttttcctaaccttggtttacttcgggggaaccatacaacctactcaacatggggactataattggagaaaggatgaggagagatttctggttccagaccacattcatccatggggaatatcctcctttgtcaatctgggctaacagttatatgggcatggctcttggagaatgggccaagaagggtaagaaaggcagtcttacttgtatttcttttgtgtttgatgtcacccaagagagggaggcgaagaagtgggcatcactgaagtaatagcatacacacggcatattttgaggatagcgagactctttgaacagtacctgggaccggtcactcagcacaatcaggcagttctttgggtcttccgaaggttgctggagagaggcgtggcataaactaagaggccagggcacagaggcactaaatatattctcgcacaagtcacagttggagcagttcccaaagtcatgcttcccacccgaaggacctactcctgttacactcacacgtgcataacttatcacctgtggcacagctatacttcacaagcatgtaacaaatcccccaatgcatgagggaacacaaccctgcagagtctctgtgtgcaaatttcatagtgtgaacacagggaaaaatgatgttcttttcaacatgaagttagccatgcctgccctctaacattcttttttttgttttgttttttagatggagtctctttctgttgcccaggctggaatgcagtagcgtgatctcagctcactgcaacctctacctcccaggttcaagcgattctcctgcttcagcctctcaagtagctgggactacaggcacatgccaccaggccctgctaattttttgtatttttagtggagatggagtttcaccatgttggccacgctggtcttgaactccagacctcaggtaatccgcccgcctcggcctcccaaagtgctgggattacaggcatgagctactgagtccagccccctctaacattctcgcttgtgtgtagaaggtacatgtaccataaaagacacaatatttaacagaatagtcaggcaagtacatcaccttacgcacacatggaatatagcggaatctcccaaagtcagtgcagctctaagttactgaagcttaaagctgcactaagtgagactcttgggacaccctatctggcctttaaatttgacagaggacaagcatttatacaatatatatattatcccatggtgatagaccatgtgctatgaaacatgcatctgggatcctgttttttttttttttttttttgagacaagatctcactctgtggccccatgctgcagtgcagtggcctgatttcggctcattgcaacctttgcctcctgggttccaagtgattctcctgcctcagcctcccgagtagctgaaactacaggcacgggctaccacacccggctaatactttgtatttttagtagagacgggatttcaccatgttgcccagtgtggtcttgaactcccgagctcaggtgatctgcctacctcgccctggcaaagtgctgacattacaggcataagccaccacgcctggccctgggatccttgtatgcagagccaaccatagcaaaactgagcttggcaactgttttctctggtgcctcctcccctgttttaaaaaatctctcagccaggcacagtggctcatgcctgtgatcccagcactttgggaggccgaggtgggcagattacttgagctcaggagttcacgaccagcttgggcaacatggtgaaaccccatctctactaaaaatacaaaaaattagctgggcgtggtggcgtgcgcctgtagtttcagctacttgggaggcagctgaggcaggagaattgcttgaacctgggaggctgaggttgcagtgggccgagatcatgccactgcactccagcctgggcgacagaacgagactgtgtctcaaaataaataaaataaaataatagaaaaactctctttccagaaggtcagttcctcttacaatcctccagagtgtccactttccactatcaaaatgtccttgcgagaagtctgtgactcatggaaattgatggcctacctcctgctaaggtggtgactatagtataccctgtttgcttcctgttctcaaggacaatctgtggctcttctgaaatgctcatgactgtaagacaggtagcagccaacctataatatgtttatgtcctacatatacattaccttgcttttatttatggtgtcatttaggaggagttttaaatctttccacaggggaatgagcctgggggaagacatcaccgtcagactcccttggccctcctgaggactgttgcttaaaaacctgtgggaatccaaaagagcccagcttagtcactgccattttccgagaagctaggaatcagaaagcaacaacaatgaactcatgtttattgaacaccttctgaaagtcaggaactgtgcacaagacataccttctcatttcatccactctacagcccagtaaggtaggcattatctcattttatagatgagaaaactgaggcttggagagagcaaattgggagtgaatcttagcgtgttcctgtcgtaacccagtaacatatatgggtgagagaaccagagaaaccgagagaggggctgggaaagaataccctcacaggcaaataatagtccttcacattttgtggtgtgtccggagagcattttgtgaagactgtgggttctcaaagtatggtccctggacctcatgaaccaggacagacacttaacgactgtaagtgacagacacttacgactgctgtttgtaggctggcctagttctcagacaggtgaccactctatttccttccaactcatacttcatgcttttcagctgctctggaaacatgacagttaaatttatagtctggccagcagagggcaacggaggccaacctttcctgccagatgtagaagaacttcatccgtttagagaaatggtgggaagttgttaaaaatgcaaattattgggccccaccccagacctactcaattggaaattctgagattaaggcccatcaatgaataattgttgttgctgcccatcaatctgagattaaggcccatcaatctgagattaaggcccatcaatgagttgttgttgtgttgttttgttttgttttgttttgttttgtttttaagagatagggttttggctgggcaccgtggctcacgcctgcaatcccagccctttgggaggcggaggaggatagatcacctgaggtcaagagttcgagactagcctggctaatatggtgaaaccccgtctctactaaaaatacaaaaattagctgggcgttgtggcacgcccctgtaatcccagctactctggaggctgaggcaggagaatcacttgaacccaggaggcagaggctgcagtaaaccgagattataccactacactccagcctgggaaagagtgagactcagtctcaaaaaaaaaaaaaaaaaaaaggaaaaaaaaagaaaaaaaagagacaaggctttgctctgtttcccaggctgtagtgcagtggtaccatcatagctcactgcagctttgaactccagagctcaagtgatcctcccacttcagcctcccacatgctaggactacaggcatatgccaccacacctggctaatttttgtttctttgttttgtttttgtagagacagggtctcactatgttgcccaggctggccttgagctcctggtcacaagtgatcctcctaccttggcctccccaaatgctgggatttcgggcatgagccaccacacctggcctattttgtttttttgtttcaatttttgtagagatgggagtgggggtggggtagggatgagggggtgtcactatgctgtccaggctggtctctaactcctggcctcaagctttggcttcccaaagacttggcttcccaaagtgctggcattacaggcatgaaccgttgcaccttgcttcaacaataaccaaaatgtgaaaaacactggtttagagaactgttggagtcccaattcatttggcctgggcttcctgaagcaaggtcagcaaaacacaccttctggtatgccacagagacttgctcactggatttgggatgggggaaagcagcaggcaaaacttaccatcatcatctcacatgcatacagtgggtgagagcccacagaaaagctttcaacatcaatcatttcattagttcttgaaagaatcctgagaggcagatatcatcatctccattgtacaaaagaggaacattaactcaaagaggaaaagggatgtgtttgagtctacaaagggcagatcaagactaagatccaccaggtgcagtggctcatgcctgtaatcccagcactttaagaggccgaggtgggtggatcacgaggtcaggagttcaagaaccagcctggccaacatggtgaaaccctgtctctactaaaaatacaaaaattagccgggcacggtgatgggcgcctgtaactccagctactcgggaggctgaggcaggagaatcgcttcaacatgggagacagaggttgcagcaagccgagatcacgccactgcactctagcctcagtgacagagcaagactccgtctcaaaaaaaaaaaaaaaaaaagacccaatccacagttcaggattcttctactatatcagaggaggaagaggttttgctggctgatgctcagaaggctctccgatccacaaatccactcacaatgggaacttgggactggctggcagcacacaccatcctgtctctttccacgctccccagactgcatgctgccctcctgcgatagctgtctccattctgttccactcaaccctgcacttgctgctcattctgaatgcctttcaggctctagttgatctgcttcagatcctgcacagcagtggaggcccctgtgggagttaccccaggccaaagtgggaggctcactcgctttcagccagaagttcaaggccagcctgggcaacatagtgggaccctgtctctacaaaaaaaaaaaaaaaaaaaaaaaaaaattagccaggcgtggtggcatgtgcctgtggtcctagctatttgggaggctgagatgggaggatcacttgagctcaggaggttgaggctgcagtcagctatgatggccccactgcatgccagcctgggtgacagagcaaaatcctgtcttaaaaaaaaaaaaggccaggtgcggtggctcacgcctgtaatcccagcactttgggaggctgaggtgggtggatcatgaggtcaggagttcaaaaccagcttggccaacatggtaaaaccctgtctctactaaaaatacaaaaattagccaggcatggtggcgggcgcctgtaatcccagctactcaggagcctgaggcagagaattgctttgaacccaggaggcggaagttgcagtgagccgagattgcagcactgcattccagcctgggtgatagggcgagactccatctcaaaaacaaaacaaaacaacaccaaaaaacccaaacaacaaccacaactcagagttaccccactggccccttcttgtggccctggagctgctgagagagtagtcgtttgtaacaaatttgcagtcactgccatcacttcccatattccaaatagctccactgggtcccacttctcttgaccggcctacagagagcaaatggttgggactatttgggggaatatttctaggtgatgagtgagaaggaggactttcaaaccccaaatctctatgtttatttaattttatgtggtttttttttttgagacagggtctcgctctgttgcccgggctggagtgcagtagtagagtcacagttcactgcagcctcaaacccctgggctcaagcaatcctcctgcctcagcctaccgagtaactgggaccacaggcacacacccccatgcctggctaattttttaaaaactttttgtagatacagggtctccctatgttgcttaggtggtctcgaactcctgggctcaagcgatccacctgcctcagcctcccaaagtgctgggattacaggtatgagacactgcacctggccctctatgtttatttatttatttatttatttatttatttatttgccactctttcccacaccatagaccagtttccttgggttagcctcagaggatgacatttgactccctaatcccagtacctgtccttaaaagcaagtttgtagtgagctccagatgctttaatcccaacagtcttgtttaatatcttttatttctttttccttttttattttttttgagacagagtctcactctgtcacccaggctggagtgccgtggcactatcttggctcactgcaacccctgcctctggagttcaagtgattctcctgcctcagcctcctgagtagctgggattacaggcatgcaccaccatgcccagctaattttgtatttttttttagtagagatggggttttaccatgttggccaggctggtctcgaacttctgacctcaggtcatctgcccgcctcagcctcccaaagtgctgggattacaggcgtgagccaccatgcccggctgattgtttaatatcttaacacaaagataatctaatgggagaattcaagctctgtggccaatttagcgtgaagggtatttgggaccaacgcatgttattcctgctgactgtggagacaaaccaggtccatgactgggtgttgacactggaactatattccttttcttagcaccagtccactgtaaggtacagcattagttggtggcctgaggaaaggcaaacctcccacgagctttgccttgttaaagagagttgactctagggggcgctgcactccacgacacggtcaggcccctgggctccctttggctcacttgttggctccaatgtgctctgttacaggtgagtgtgaggggatccaggcaggtttcttgctccctagagcttatagtcatcaaagaagagatataaaatggattacagtgggaaattctaggtgatgggttatattatcctttagaacttttctgcaacttttaatttcctcaaattaaattgcaaattaaattcagttttaagaaggaaaagtatgaagtgctttgagtacatataacgaggagacctggccacccaaaaggaaggtgatgagtgcgccacactgtgagacagggccctgcatggattatataaccttgcaggtggtctcacatttgggcacaggggtgcagaaagtccagctgatatcagaagggcctaattagttgactgtaaagtcagaggggcaacctaggcttacttggttctttgaatgacattactgataaggagcccaagtttgtccccagggcctgggagtgctactctggccttcaggtggctgcatagctagggctgggggtggaatgcatttaactttcttaatgggaataaatagttttccaggctgacaaacatacattaacagggtgggctagtttctgttggatggaagagttaccctggatccctgagaagtaacgacagtatccaggattaattaggttgtaaagtagtaaccaggagttttacatatcttttaattcttatttattttgagacagggcctcactctcacccaggctggagtgcagtggcatgatcatggctcactgcagcctcaaccactccggctcaagtgatccttctgccttagcctcctgagtagttgggactacaggctagtgctaccacacctggctaatttttgtactttttgtagagatggggtttcaccatgttgcccaggctggtctcaaactcctggcctcaaagaatccacttgcctcagcctcccaaagtgttgggattactacaggtgtcagccaccacacccagccaatttggtttaattcttacaattattctaacgacttagctattatcctccctgtaattaaacaaccttttttgttttttgttttgttttgttttgagtcggagtctcactctgtcgcccaggctagagtgcagtggcgccatctccgctcactacaagctccgcctcccaggttcacgccgttttcctgcctcagcctcccgagtagctacaggcgcccgccaccatgcctggctaattttttgtatttttaatagagacggggtttcaccatgttagcctcgatggtctcaatctcgtgacctcgtgatccacccgcctcggcctcccaaagtggtgggattacaggcatgagccactgcgcccggccattaaacaacttttaaaaacggacatggtaaaatattgaaaatgtactaaggagcaggtaagggaaaaaaagtcaccttttcacacctgaccagctgtccttctgtttccccttcccagaagtaactctggttgtgtctttcttttgtgtgtgtgtgtgctttttttttttttttgagatggagtctctgtctgtcgcccaggctggagtgcagtggcgcgatcttggctcactgcaacttctgcctcctgagttcaagtgattcttgagcctcagcctccctagtagctgggattacaggcgtgcgccaccacacccagcgaattttttgtatttttagcagagatgtggtttcgccattttggccaggctggtctcaaactcctgacctcaagtgatccgcccacctcccaaagtgctgggattacaggcgtgagccactgtgcctggccaaaaatatttttcttatgcaagtgatagtatactatatacactgttattcacttttctcttaatatacctttaagactaattcatattaatacatataactcatttcccaacagttactagctgcagggtattccaccgtgtggctgaactatcatttatttattcaaatttctattaatggacattcggtagtttccaaccttttgctactgcagctaatgccgcaaatgagtatctttgttagtgcctcataacattttaattttatttgattttaattaacttaaattgtagaactgaggccaggcatggtggctcacgcctgtaatcccagcattttgggaggccgaggctggcagatcacgtcaggagatcgagaccatcctggctaacatggtgaaacccagtctctactaaaaatacaaaaattagctgggtgtgatggcgcctgcctgtaatcccagctacttgggaggctgaggcaggagagtcacttgaaccagggagtcagaggttgcagggagccgaggtggcgccactgcactccagcctggcgacagagtgggactccgtctccaaaaaaaaaaaaaaaaaaagtagaactgaagcaatgaaaacatttttccattaacctaacttggaataatattttggatatatttgggttaaataaaatattaaaattaatttcatagctgggtgagatggctcacgcctataatcccagcactttgcgaggctgaggtaggaacatgtcttgaggccaggagttcaataccagcctgggcaacatagcaagaaaaaaaaaagtaaataataatgataaataaaatgaattttacctgtttatgtcaaaattaaaattgcatatgtggcttgcattacacataaaaacacacacatatataattttttttttttttaaagagacagggttctgctttgtcgcccaagctggagggcagtggtgcaatcatggttcactgcagtctcaaactcctgggcttaagcgatactcagcctcttaaatagctgggactatggccacatgccaccacgcctagctagttttttagttttagtagagatagggtcttgctatgttacccggccagtctccaactcctggccttaagtgatcctcctgcctcggtggctcaaagtgcagggtatatttctcttagctagtattgctctacattgttgtagtctggtggtggcctgatatccctactggactgaaaactccctgaaggtaggagtccagtctgtctggatttctcttgtgtctccataatcacccaacctgacatggaataggtggttaatccatttttgttgaatgagtggaaaaatgtgctctcccaggaagaaacatatgcttcccagcttcaagtgttagtgaacatcttcctagaaggcaggctgaggcggaaagggtattgactccggcttctccaccagaggaccttgcaattccagtcaattccctcggtaactcttatggaggagtggcaatataccttaaaaaaggagtgtgtgttgcggggtattccgctgcttggttatgtcaccaggtggattaaatttggacaaaatttcccaaggtgtaggtactctacaaacactagttaccctcaggaatgtgcgatcaacaaaagaatgcaagataacaaggcccctaggcagcccctgggtcttgtggctcccgtcgaaggcagagctctggagccgcctacgccggggacaggcgactacacctggggcccctcaccctcgggcctcctgcacgtggcagggaaggcagggcgtctctatctcaaagcattggctgcgcctgttacctgcgacaggattcccgacaagggacgggtacggcgtgtgcactcaggagctcctagagctaggggcagcaactaagaagctacctggcggatgttgcgagaggactccgcccacagaacggttggcccccaaccccgcagccggcggacttcccgaggccaggggtctgaacgcgcgtgcgcatgggcgcgcgcccggcgcgagaacgcgcgcgcgctctcgaaagaaaaaaaaaaaaaatcctctccgcggggtcccgcggcaatttaggccggggtctgccgacgaccgcgcgtgcgcgggcgtgcatctacgccctcctccaccgccccctccgctgggggtctagcgcactgctccgcttcccccgtttcccccgggctagcgtcctaggggtaagtgactcgagcctggcagagagtgagggagaggttccgccgaatgaagggaggaggtagacggggccaggagaaaggagaaaccgccccggcggggcgaagagcgcggctctcgagctgtagtctgcaggagacacacctccctccctcacgcccctcggggctgcggaagtgctctacagactggagctgcacgaaggcgaccagcggactaccgttcctaggaggcagcgcggcggtgcgcctacggctcccggcagcccccgcgcgccattctctttttgagttcgcggccggctagggcgaaactacagttcccaggaggactcgcgcgaagcggcttggaagtgggcagcctggaagtcactcgggccaccggagctggcggcgtctccagcgagcggcgcggagctggacgccgcgatcgtggggcccgcgaggcgggcagccggggcgtccaggtacgtggctccgggtgcaggatcggcctcgcgcaagggtggcggggaatcggtggctgcccggaccccgagggtcagcgcgggcggacggccgggtgtgggtactggccgtggggggcggcggcgccgggactcgcgccctccggacccagccggactcgtgcccgcatggctcaactttccaggcgtgcaccccggcgctgtggtgaagagcttggaggcggggagcggtggattcgcgtcccggctgtgccactcgggagccgcgatctgggaaaaccgcgccgaacctcaatttcccctgcagtaaaacggagtaggagagcatcttggcggagactctgttgagataatataataaaacatttggcacataggaggcacttactacgtatttgggttattgttagctctccgaaaaatgaggtgaagatgttatcgattgcatagggtgaggattagttgagcgtgtgcatgtaaagaggtgagtccttagttagcacccaatgcaggctagctgctgttaaccgagattattttgttaagagcgttggtttggaaggcagagagaccccaggttcaaatttgaacatttaccagctgtgtgactttgggcaactggcttcacctctctgtgccttggtttccctatctataaaatggggatttaaatagcaaccacttcgtcgagttgttttcaggatgcagtgagaataccatgtgtaaagtgcttagcacagcagctggcatataacgctcagtaaatggtaccatttattcagcgttttcctagtggcccagagaccctctgagggtggggctctggccgtagtattggtcacccccgagggccagattcagaactggtccagttgacttcccttcctactacctcaggttcctcatttacaaaatgggataataacaagatcactctcaaagggttgtaaggatttgctgagattgtatttctagtccagcgccatctctcactaagtagcagctcttatgtattataattgttcttcaatattctccatctggcccagagactgcctgactgtgggctgtgacatgacagccctgagctcccccacacatttgctcccatcctcagtgtcccatctgtggaatggtagtcataggacttttgtgccaggattgtttggatggttccaggagataattcatgtttagtgctttgcacaaggcccggcacacagtaagtgcttattaaatgattaaatgtatcttgctgtttttttttttaataggccctttttgcttctgtttgtacctacatggcagagtgagcacaaagttagtgtttttttatcttccccctccctcccaaattttacttaccaaagattaaattatggaacacactatagtagaaaggcctaagaagaaatgggtctgacctgccatcagcagtcccctgctcacacacccctccccacagagccagtatgttcactccagtgctttaattattgtcctggtgctgccagcttttgcctttgtgtcccaaagccactgagtcccctgcactccagctccagatgtggagcctgtgcttctttgatgctgtggctcaaagaagtggctgtttcttgggcaccataaactcagcatgtccaacctgaactccttctcctcctggaaccagtagtcaccatcttggcaaatgtgccagcattgacctggttgcctaagccagaaacctgggagttgctcttcttccccagccttcccatatccagtcaactagcaagaaggacgaagctgccatttcatagaaacaccatttcattggcccatattggtctcccatctgatgggcactgaaagttcccctcagcttgagacggagtcttgctccatagcccaggctggagtgcagtggcacaatctcagctcactgaagcctccgtctcccgggttcaagcaattctcctgcctcagcctcctgagtagctgggattacaggtgcccgccaccacacgtggttagtttttttttttttagtagagatggggttttcaccatgttggccaggctggtcttgaactcctgacctcaggtgatctacccattttggcctcccaaagtgctgggattgtagggcatgaaccaccgcgcctggctgtgacaaggttaagtcaagtcattagggattaacatacgtaaacctatgtaacatatgtattaataagggcaagaagatgttatagacttggctagacagcagtggctgtggatgtggcatgaaagcctggctttcaggggacccagttctgtgattttagcctggtaaagatcggctgagttgttaatttctttcagaaaagttagatggtgtcagcggcttagaatatcccgtgtgggagggtggccatcctgggcatttcaggaggcagcacacataccacacacccaagaagaggctgggaagggaatttattagcgctccccttaggttgagtttattgtcagaaacctgtcattgtgatttcatttgatgatagaaaccggtggcctcaatcacatttgtgatggccaacaaatttacctaagcattttgctaacctgaagaagtaaagcagtggcttaaaaaaaaaaaaaaaaaagcagcacgtggctttttagcagtcagtgtagaatgaatgatctaagagttaaatgtgagtctgtgtttcagacattgcagttgttaggtggtaaatcaaaagtggaatttagaatgtgcagtgattggtgcctcatttttttgctgtaaaatatattttactgatatatttcaaacatagtcttagtaacttgtaaaatgtaaattaaatgtatttacattttaataaaagaattcaataatcatttcctttaaaataaagtgtttgtttttagctattagaatgagaggctatttggcagggtgcagtggctcatgcctgtaatcccagcactttggaggctgaggtgggtggatcacttgagcccaggagtttgagagcagcctgggcaacatggcgaaaccccatctctacaaaaaattagtcaggtgtggtggcacacatctctagtcccagctacccgggatgttgaggctgtagtgagctgtgattgcagcattgcactccagcctgtgtgacagagtgagaccctgtctcagaaaaaaaaaaaaaaaaagaatgagaggctgttgtaccagtttgtgcatttgtgtattcttcaagactgatattgcttcctttttgttgtttttagacagagtcttgctctgtggcccaggctggagtgcagtggcacgatctcagctcactgcaacttccacctcctaggttcaagcgattctcctgcctcagcctcctgagtatctgggattacaggcatatgccaccatgcctggctaatttttgtatttttagtagagatggggtttcgccatgttggcctcgaactcttgacctcaggtgatccacccaccttggcctcccaaagtgttgagattacaggcgtgagccaccgtgcctggcctattgcttcctttttttaaggactattttggtcatgaccttttgtgcgtgtgtgtatgtatgtgattgggttgaatttagcttaaaaaaagttatgcaagaaattcatgcttgttgtaacgtgtcaaacaatacagaggtgtagggaaaatacctagtgccaccctccactccaaaaccccatgtcgccagagataaccatttattcagacagtgagtatctattaagtatctattgctaggctttggagatagcataatgaacaaaatggatgtgctctctgcccttgtgatttggacagatgcttcagttatctttttctgtgtttatattgattatgtttgtatgtatgtgcgtgtgtgtgtgtgtgtgtgtatcgactgttttcttcctcctcccataccattccccaaaaaaggagggggtagggatcaagctacacctatttgtaacccagttttttcaattaatggctgggcatgtccttccaagtcattacatatagatctggcttatccttttcaacagctgtacccacattcttcagtgcagagagaccacgctttattccagcattcccccactgctggtcctttaggttgttcctctgagatgtcttttttttttttttgagacggagtcttgctctatcgcccaggctggagtgcagtggcgcaatctcagctcactgcaagctccgcctcctgggttcacgccgttctcctctgcctcagcctctccgagtagctgggactacaggcgcccgccaccacgcccggctaattttttgtatttttagtagagatggggtttcaccgtggtctcgatctcctgacctcgtgatccgcccacctcagcctcccaaagtgctgggattacaagcgtgagccaccgcgcctggcccctctgagatttctttacctcagcaaacacacatctaataagtatccttggtggtggctcaggagatcgagaccatcctggctaacacagtgaaaccccgtctctactaaaaaatacaaaaaaattagccaggcgtggtggccggtgcctgtagtcccagctgctcaggaggctgaggcaggagaatggcgtgaacctgggaggcagagcttgcagtgagccaagattgtgccactgcactccagcctgggcgacagagcgagactccatctataaaaaaaagaaaaaattagcagggtgtgatgatgagagcctgtaatcccagctacttgggaggctgaggcaggagaattgcttgaaccagggaggtggagggtgcagtgagccgagattgtaccactgcactctagcctgagtgacaagagtgacactctgtctcaaaaaaaaaaaagtataaaaagtatcctttcacataggcagcatggcccagtggctgaagcacaaactctggggccacatggtctgggttcacactgtgactctatcctatattagttgtgataccttgggcaaatcatgtgtccttctgagccttagtgtcctgatctgaaaatggggatgataccagtgtcttccttatagggtggttgttgagaggtttcataagattatctatgtcaagccttcagggcagggccagctgtgatcttttttttagagacagggtcactctgttgcccacgctggagtgcagtggcgtcatcatagctcactgtaaccttgaactcctgggctcaagtgatcctcccacctcagactccctagtagctggggctacaggtgtgcaccaccacacccagctaatttttaaatttttgtagagatagggtctcacactatgttgcctagactggtctcgaagtcctggcctcaaatgatcctcccgcctcagcctacatgtgttctttcaaacccagagaaattcacaggaagagccaactcaatcacttgaaacaccaggtagaaataagaaaaagttatattgcagggatcccgcttggagatgttgggggcctaaggtgagggatccagctgccgctgaaagaagggaggagatttgcccaggaagacaggagccagtaaagtgccctgaccacagtgggtggtgggggtgaggggctggtggtggagcatcagtgggaaatatcactcctcatatttgcgagaagtgtgccatggttggaaggtggcttaggtggcgggcagaccaagttcaaatcacagtatagccactaacttgtaagatgtgcactgagcttttttcttcattggcaaaatgggtatgatagtagtctttacctcgggggtcgctggagactgaatgaaatgtctgcaagactttcagcacattaggctgtcattagccctgtgcagttagctactattcttattttattgagttgacagatgtgttgagaccctgctgtgagccagggtcctatcctaggcactgaggattcagcagtcaacaagacagacaagatccttgctgtcctagggtttacattctagccattctagcccgggaagacacacaataaacaggatcatttcactttgtgtttttgagatggagtctcgctgtcacccaggctggcacaatctcagctcactgcaaccactgcctcccaagttcaagcccatctcctgcctcaggctcctgagtaactgggattacaggcatgcgccactatgccctgctgatttttgtatttttagtagaggaggggttttgccatgttagccaggctggtcttgaactcctgacctcaggtgatctgcctaccttggccttgtacagtgctgggattacaggcgtgagccactgtgcccagccttttctttcttttttttttttttaattaaaaaaaatcctggctgggcacagcggctcacgcctgtgatcacagcactttgggaggctgaggcgggcagatcacgaggtcaggagatcgagaccatcctggctaacaaggtgaaaccccgtctctactaaaaatacaaaaattagccaggtgtggtgacaggcgcctgtagtcccagttactcgggaggctgaggcaggagaatcacgtgaacctaggaggcaggaggaggcggagtttacagtgagcctagattgcaccactgcactccagcctgggcggcagagtgagaggccgtctcaaaaaaaaaaaaaaaaaaaaaatcctgatcctgcctcttcagatagttttaactgtgatggagaaaatttaacagggtaagtggagagcaaatggctgatggggcaagatggcggtggttaccttagctttgatggtcagggaaggcctcccaggcctctttgaggagtcatgtgaactgataccttaatgagcagtggcactggctatgccgaaagttgaagaaagaacattccaggtagagggaacagcaagtgttaaggcccggaggtgggagtgagtttgctacaaagagtatcagtttgactggagaagagttaattcctagttttcaagttgatactactttaattttttttttttttgtggcagggtctgctctgtcgcccaggctggagtgcagtggcatgatctcagctcattgcaacctctgcttcctgggctcaagtgatcctcctgcctcagcctcccaaggagctgggattacaggaatgtgccaccacacctggctaatttttttttggtacttttaatagaggagacaggttacaccatgttggccagggtggtctcaaacgcctgacctcaggtgatctgcctgcttcagcctcccaaagtgctgggattacaggtgtgagccactgcagccggccacattttttctattttttgtagagacctgttttgcccaggctgatcttgaacttctgggctcaggtgatcctccaccctcagtcttccaaagtgctaagattacaggcacgagccaccatacctggcctacttttttataaaataataataatgatagcagcttacctggtgcttactctgtgctagatgcttttctaagcatttcacacattcctcagttaatcctgacagtagtccagtgaagtaattaacttgatcaaactcattttacagatgaggaaactgattccaccctccatgctcttcacctgcattctaaactcttccagggccctccttaccaggcagaggcaaattgaggaagtggacacagcatttcctttccttgttgtttgacatgcaaagcactttagactatatttagtacctaattgatgtggcagcaggggccgcctgggatgttgtggcatcatttttgctctcaatgagacacgatagggatggtttggtggtggtttcaaaactaaagaccctccagcagagcctgtcaagtaaaacaaggttgactgcttggttgccataccaggcacaggttagcatgaaacaaagtgtagtgtccaaggagagggagcagggtgtctcctttgggtgagctttgcaaggggacttgggacttggctggaaaaggtgtttttttttgtttgtttgtttttgttttttttgagtcagaggctcgctctgttgcccacgctggagtgcagtggtgtgatctgggctcactgcaacctccgcttcctgggttcaagcgattctcctgcctcagcctcctgagtacctggagttacaggcgcccaccgccactcccagctaatttttgtatttttagtagagatggggtttcaccatcttggccaggctggtctccaactcctcacctcaagtgatccgacggcctcagcctcccaaagtgttgagattacagatgtgagccatgcacccagctggaaatggtgttttaagcacactagccatgtgggctgttaaagtatcatactatagcccatcaactaagacaatgattcttggacctgtaagggccccaggtccctgctccggcatcatgacctgtgtgcactttgatttgctgtagcgtgggcgtattttgaatgaagggtagccctggttagatgtgaggacagtagtgggtgcttttaagactaaaaatattgggtgggcatggtggctcaggcttgtaatcccagcactttgggaggccgaggtgggaggattacttcagaccagaagttcaagaccagtctgggcaacatagaccccaactctgcaaaaaaaaaaaaagtttttgtttttgagacagttctcactctgttgcccaggctggagtatagtggtatgatcacagctcactgcaacctctgcctcctgggttcaaatgactgtcctgccttagcctccacagtagctgggattacaggcgcccaccaccacacccggctaatttttatatttttagtagagatggggttttaccatgttggccaggctggtctcaaactcctgacctcaggtggtcttcccgcctcagcctcccaaagtgctgggattacagacgtgagccaccgcatctgacctcatctctgcaaaaaatttttaaattagccaggcttggtgatgtgcacctataatcccagctactcaggaggctgaggtgagaggatcacttgagcccaggcactaccacaccttgagcccaggagatcaaggatacagtgagctatgatcacaccactctgtgtctaaaaaaaaaaaaaaaaaaaaaagactgaaagtatggagagcatctttcatctgtccatctgtgaaacatttcttcacctaccctgtgtgtcagggtccatgcttgacactgacagtataaagttgaataagacactggttctcaaaagcccacaacagtgctgtctgttagaaatataacgtggggccgagcgcggtgactcatgcctgtaatcccagcactttgggaggctgacgcgggtggatcacttgagttcaggagttcgagaccagcctagccaacatggtgaaatcccatctctacttaaaatacaaaaattagctgagtctggtggcatgtgcctgtaatcccaactactcgggagacggaggcagagaatcacttgaaccctggaggtgacagttgcagtgagccaagattgcaccactgcactccagcctgggcaacagagtgagactccttctcaaaaaaaaaaaaatgtgggtcactgatgaggctcatataggtaattaaaaattttctagtagccatattttgaaaagtaaaaggaagcaggaaagtaattttaatgatatattttatttcatctaaaacatcatttcaacatgtaatcaatatagaaattattagtgagctattttacttccttttttccacattaagcgtttgacatacaatatgtattttacactttcagcgtatctcagttggtaccagccatgtttcaagtgctcggtggctacatgtggctaatggctaccacatcggacagcactggccgagggtatgagattcacgtgtaaatcaaaggtggtagttcagtgatagatctgacatgccactcctgttttatcttggcggagaagggcagatgtatgatgaaaagcaggtttatcacaagcagttatagctaaccaaagagctactgtccatcaaacttgctgtatgtgcctggcactgtgcttagtgttggtgggtgttgcctgtgttcggaggtgccagggactacagttattcccatttcacagatgaggaagctgagataaggcaatgagaggtcacttgctcaaagttgggaagtggcagaggcagcatttgagctcaggtgcagagtgtatacttttaaacctgttttatatgctgtattggagggtgtttaagggggatagggtctgagttttgagcaatgaaaaccataggagggacttgttgcacaaaatcgattctgaggccggtcgtagaagatcatacctgtaatcctaacattttgggaggcccaggcaggaggattgcttaagcccaggagtttgagaccagcctggacaacaaagcaagactccacctctacaaaaatttaaaaaattagctgggtatggtggcttgtgcctgtggtcccagctacatgggtggctgaggtgggaggattgctttaggccaggaggtcaaggctgcagtgagccgtgattgtgccactgcactccagcctgggtgacggagaaagaccctgtctcaaaaaaaaaagaagtcccagtttgtcagcattaatctctgggtttacattggtgtcggtgtgctggtttgagacctgaatgattgagaggtccactccttaaattgacctctaggtttgctggaacctggaaccttacctcccaggaaagagaggggtctttggggagttgggaggagggtgagcagggggactaaggaaggcaaggaaaggtcttggcgtgtttgaaagctcatttctttgttttttgtttgtttgattgtttgtttgtttttgagacagggtcttgctctgtcaccaggctggagtgcagtggcgcgatcttggctcactacaacctccacctcctgtgttcaagtgactctcctgcctcagcctcccgattagctgggactacaggtgcgcgccaccacacctagctaatttttgtatttttagtagagatggggtttcaccatgttggccaggatggtctcaatctcttgaccttgtgatccgcctgcctcggcctcccaaagtgctgggattataggcatgagccagcatgcccagcctgaaagctcatttctaaattgctgctttggggccaggcctggtggcttatgcctgtaatcccagcactttgggaggatgaggagggcggatcacctgaggtcaggagttcaagaccagactggtcaacatggtgaaatcccatctctactaaaaatagaaaaaattagccaggcatggtggtgggcacctgtaatcccagctacttgggaggctgaggcaggagaatcaaacgaacccaggaggcagaggttgcagtgagccaagatcacaccactgcactccagcctgggcggcagagcgagactcggtctcaaaataaataaataaataaataaataaataaataaataaataaataaacaaactgctgctttggacatgaaacctgttgtgtcgctgactctggccctcattgctgtgtattctggtgggtgctgtgggctctggtggaagcaacagcagagcttagcttgtgaatgtgtcttacccttgctgtgctccaaagacattgccagtggatggggtgtggggaagggacatcacagtggtttcctctgtcaactctatgagagtcgtggttctagactttttggaggtgtcaggtgcaggttgaatcctggccttctacctaaacagggcaggtgctggagattctcagcttgttcctgtccccagatggtgctcaccacacttatctccaactgctggacagtgcctggcatgtgagagatgctcagtaagtatctgttgaattaatgatacgagccagcattcactgagctcttactatgtaggaggcactgttctgactgcttctcagctaatatcttattgaatccttagaaccactccttggggtaggtactgttgttattaccatgtctcgtaagaggaaactgagttacagagaagttcaagtcacagagctggtgagtctcaaattcaggattcctatgcaagtcactggctccagagtctaggctcttaaacactcactgtgtggtctttcgatgaacagacagacgaacagatggggcagacaagcaggaccattctcacttgttccggcctcctcactccacacgtggtctccccctgttttgggggagccccacaacagatcccaggcccctttgggccctgaggcttttttttttttttttttttttgagacagagtttcactcttgttgcccaggctggagtgcagtggcgcgatctcagctcaccgcaacctctgcctcccgggttcaagcaattctcctgcctcagcctcccaagtagctgggattataggcatgcgccaccatgcctggctaattttgtatttttagtagagatggggattctccatgttggtcaggctggtctcgaactcccgaccttaggtgatctgcccaccttggcctcccaaagtgctgggattacaggcatgagcgactgtgcctggctgggccctgaggctttaatacccctctggccagtgcttcttggtttgtaatttttttttttttttttttgagatagggtctcactctatcacccaggctggagtacagtggcatgatcatagctccctgcagcctctacctcctgggctcaagcgatcccccatctcagccttctgaatagttgggactacaggtatgcacaaccatgcccagctaatttttaatttttttgtagagatgggatctctctatgttgcccaggccggtcttgaactcttggactcaagcgatcttccctttttcctcccaaagtgttgagattacaggcatgagcccaccatgcccaacctaaaaagtccttatctataagatgctcatgctgaaatatctatgattaaactgttaagatatctcggatttccttcaaaataatatagacaggcagagagtgcaggggctcaagtgtgcatgggtgaataagagatgaaataagattgtctgtgagtggaactattgaagccagacaatgagggcttattatactctttttttgccttgatgttttgaaatgtatcatcatgagaagttaaaaacaagtacaacaaatttcacccagcatttgtgtatttcaagctcaagtgtacatacaggggaattccctgcctctgctcagtccacttatataatacaaatgtttgcttttttcttttttttgtctctattatatgagccaatacttggcccaaggctttggaagcccctttgataaagccgtgtctggcagcagtgggaacacccggccaggccccagcagccctggcttctctgagcagcgaacaccgtggcactggccttcgagtcagtttactgaggtcccttttccctgagatctgtttccctctagcacctgcctgtggggcccctcccacattttttccaaggacttgtttcaacaaaaagcctcagaccctcccctcaggacagacgtacacagatcttctgacacccggccttcctctggtgggtctttgttgaggccccacacgaaccggaatccagtctttggtgtgcccacagcaccgcggcaggaggcaggaaacgtgcccctttccagttctgactctggacaaaagaagaaaaagggcaagatgcagcttgtgacagtgcctgggacctgatggtatttctaatcaagctagcagctacaacgcctttacggccggccggcgtgcgctccccgctcccatcactgcatttgtgctttgggggtctggaacaacagcacatgagtatgtggtaaaattcttatgcggaagtggcaggaaaagagggaaacgtttgggggcttctcctgatggtgtgctgcctggtgggtagagatggttgatgggaacaggagtgctggttggtcagatcctgccagtgctggcgccgtttgttgcatctgatggtgagctctttcctctggtgccccgtttttctatgctgtgctgttggtttgcagggaggaagacagggaagtcctgcaccccctcaagcttccataaacttccacccccagcaccatcttcatctctgtcctttctttttctttctttttttttttttttgagacaaggtcttgctctttcacccagcctggagtgcagtggcacgatcacaactcaccgcaacctcgaactcctgggctcaagtgatcctcccacctcagcctcccaagtagctgggaccacaggcatacgccaccacgcctggataattttttttttatttttgtggaaacaggttcttgctatgttgtcgtggctggtctcgaactcctggcctcaagtaatcctcttgcctcagcctcccaaagtgctgggatcaaaggcgtgagccaccatgcctggcctgtttttctttccaaggcaccttttgcagttcttttagtagagaggctttcaggtgagtctagtgtggagggaatgtcatgagctctgtcttcagtataggtggcttgatttgtgtgtatttcccagtgtggactgcacgttggatctgagggcagcaaaccccaaatgctgatggcgtgtctgattttttttattttttgagattgagtttcgctgtttcacccaggccggagtgaactggtacaatctcagctcactgcaacctcggccccaccgggttcaagcaattctcctgcctcagcctccctactagctgtgattataattgcctgccaccacacccagctaatttttgtgtttttttagtacagacggggtttcgccatgttaacaaggctggtcttgaactcctgatctcaggtgatccacccacctcagccttccaaagtgctaggattacaggtgtgagtcactgagccctgccttgatttttattttattttattttgagacagagtcttgctctgtcgcccaggctagagtgcagtggtgcgatcttggctaactgcaatctccatctcccgggttccagcgattctcctgcctcagcctcccgagtagctgggactacaggtacccgccaccgcacccggctaattttttgtgtttgtagtagagacggggtttcactgtgttagccaggatggtctcgatctcctgacctcttgatcagcctgcctcggcctcccagagtgctgggattacaggcgtgagccactgagcccggccttgatttttaaacttatcaagtcctcagtgaggggagcactgttctagataccagggtgcagccatgaggaaaacagacaagggttctcacccttctggggctcaccttcaagtggaagagtcaatcaacaaacaagataaagaagtaaaacacggctgggcacggtggctcatgcctgtaatcccagcactttgggaggccaaggcaggaggatcatgaggtcaggagatcgagaccatcctggctaatacggtgaaaccctgtctctactaaaaatacaaaaaaaaaaaaaaattagctgggcgtggtggcgggcgcctgtagtcccacctactcgggaggctgagacaggagaatggcgtgaacccgggaggtggagcttacagtgagccgagatcgcgccactgcactccagcctgggcgacagagcgagactccatctcaaaaaaaaaaaaaagaagtacaacacgcaccgtgtcagttggtgataagtgcgagggagcagaaattaaacaggcaaagggcctaggaagcagtcacgcatggcttcacagtggggctgtgttctgagaaatgtgttgttaggctcttttgttgtgtgaacctcatggagtgtacttgctgcgaagctagatggcacagcctcctccacacctaggcgctatggagtaggctattgcttctaggccacaaacctacacacatgtgactgccctgaattctgtgggcagttgtaacacaatggcaagtatttgtgtatctaaacatagaaaaggtacagtaaaaatatgatataaaagattttttaaaaggtgcacctgtacagggcacttaccgtggatggagcttgcaggactggaagttgctccaggtgagtcagtgagtgagtggtgagtggatgggaaagctaggacagtactgtacaccactgtagacttaacagacacggtacatttaggctacactaaatttattttaaaaaatgtttcctcaataatacattaaccgtagcttactgcaacttgtttactttgtaaacttctaaatttcttaactgtttgggttttttttttttcttttttttgagacagagtctcgttctgttacccaggctggagtgcagtggcacgatcttagctcactgcaacctctgcctctcgggttcaagcgattcttctgcctcagtctccccagtagctgggattacagacaccttccaactgtaatctagtttgtttgttgttgttgtttttgtatttttagtagagacagggtttcaccatgttggccaggctggtctcgaactcctaccctctggtgatctgcctccctcggcctcccaagtgctgggattataggcatgagccgctgcacctggccttgactctttggtaataccacttagcttaaaacacaccttattcagttgtacaaaaatattttctttatatctttattctgtaagctttttttctatttttaaatttaaaatgttccgtttttatttttttgctttctgagctgcttttagtaaaaactaagacacaaacacatgagcctaggcctccacaggatcattagtatcactcttcctcctccacatcttgtcccactggaaggtcttcgggggcagtaacacacgtggagctgtcacttcctatgataacagtgccttcttctggaatatctcctgaaggacctgcctgaggctgttttacagctttttttttttttttgtatataagtagaaggagcacactctaaaataacaataaaaagtatatatacagactggccaacatggcgaaaccccatctctactaaaaatacaaaagttagctgggcatagtggcaggcgtctgtaatcccagccgctcgggaggctgaggcaggagaatagcttgaatccgggaggcagaggttgcagtgagctgagattgcgccactgcactccagcctgggtgacagggctagactctatctcaaaaaaaaaaaaaaaagtatatatactaaatatgtaaaccagtaacatagtcatttattatccttatcaagtgttatgtactgtacatgggctgggtgtggtggctcacgcctgtaatcccagcactttcggagcctgaagtgggcggatcacctgagatcaggagttctagaccagcctggcccacatagtgaaaccctctctctactaaaaatacaaaaattagctgggcgacgtggcgtgcacctgtaatctgagctactcaggaggctgaggtaggagaattgcttgaatccaggaggcagaggttgcagtgagccgagatcacaccactgcactccagcctggggaatagagggagactctgtctcaaaaaaaaaaaaaaaagattatgtactgtacatgattgtatgtgttacattgtcttttacgtgactggaagcacagtaggtttatttacaccaacaccacgacaaacaggtgaataatgcatggctctccgacctccccgtggctcatgtcactaggcaataggaatttttcagctccatggtcgtcttgtgggaccacccttgtaaatgtggtccattgttgactgaaacagtgttatgcaacacatgactgcgttaaggtggagggtgttgaaattttgggaagggtggccagggatggcctccttgggaaagtggccagacctgaaggaggtgagggagtgggaacagccagtgcaaaggccctgaggtgaggggcctggtaagattgaggcccacatggctggagcggaatgagcccaggagagtgggagggatgagggtagagaggagatatttgcagatctcttagggtcctgcacaggtttgtcttttctctgattgagaaggttaagatttttcagggttgattgatttattacttttttttttttttttttttttgagacggagtctcactctgttgccaggctggagtgcaatggcccaatcttggctcgctgcaagctccgcctcccaggttcaagcgattctcctgcctcagcctcctgagtagctgggactacaggcacgcaccaccatgcccagctaatttttgtatttttagtagagatggggtttcaccatgatggccaggatggtctcaaactcttgacctcgtgatccaccctccttggcctcccaaagtgctgggattacaggcgtgagccattgcgcccggccgatttattacacttttgaaaagtttgactagtgaccacatgtacaaggaaccaaagcaacaaaaatagggcacccagttcccttcccaagagaccaccacaattccagtttcctgatggtgaccagttccttgacactacattatctgagtgagtttcctgtcttgtattaggttggactgcctgacattgtgctttcgtgggtcaagaatggttgaatattggcaattttatgaggttcagcctaacagcttcctttcaggaacatgaggaatttggccaatcctttcttgctgtgagggttggtagtcctcccccgattcctcctgcatctcaccatcctctttcagtgacaggcccaacagtgcctgtaacaccagggcgtgaaaacccctgccctacttgtggcctcaaaccagggcttgctattaagcccagcaagaggctgccccttttccacggggacctcacctggcttctgatgttcgtcactttggctttctgcgtcttggtgccaccagttttgaaatcacagctcccagagggaggggcacccgcggactcttgctgggtgtttggtgtgactcacatggtgggggtgctctctggaacccgtgggcattctgcatcagtcacccatcagagtagctggcagagcacccagcttgaggtgtctgtgggaatctctgcggggaccaggtggctcaggcttggggagggggcctgaggagccgtgcacctccctgtagcgatgggagacttgcaagtcgttgtggaaccagggcactggcctcggtcctgtgggagcgggtgggggtgaaataaccttaaaggagatatggcgccaactttggaagagctcagtcgggaagttgtgtcagttggtaagcctttggctgcaaacagtagtaacagcatcagcagcaacaactgcagcagcaagtaggcaatgtatgtagcgtctgctgcatgcaagacactgtgccgggcccttcacatgaagccactcctttaagcctcccgacaaccctggaagatattattctccctttgcagatgaggtaactaaatttgaataacttgttcaaggtcaggcagctaaaaaaaggtggtggcatgatttttttttttttagattcagagggtacatgtgaaggtttgttacatgagtatattgtgtgatgctgaggtttggggtacagatcctgtcactcaaatagtgaacagagtacccaataggtagattttcttttccttttttttttttttttgagatggagtctcgctctgtcacccagggtggagtgtagtggcgcaatttcagctcagtgcaacctccgcctcccgggtttaagcaattctccctacctcagcctcccgagtagctgggattacaggtgcctccaccaaccatgcccggctaaacttttttgtattttttagtagagattggattttgccttgttggacaggctggtcttgaactcctgacctcaggtgatccacccaccttggtctcccaaagtgctgggattacaggcgtgagccactgcgcctagcccccagtaggtagattttcaacccttgccccattccttcttggtttttggaattctcagtgtctgttgttcgtgtgtgtgtgtgtgtgtgtgtgtgtgtgtgtgtgtgtgtacgtacccaatgtttagctcccacttagaagtaagaacatggggtgtgtgtgtatatgcaatgtttagctcccacttagaataagaacatggggtgtgtgtgtgtgtgtgtgtgtgtgtgtgtgtgtgtgtatgcaatgtttagctctcacttgtaagaacatggggtgtgtgtgtgtgtgtgtgtacgtgtacgcaatgtttagcatcccacttagaagtaagaacattggatatttggttttctgtttgtgcattcattcacttaggataatggcctccagctacatccatgttgctgcaatagacatgatttcattcttgtttaatggctgtgtagtattccatggtatatatgtaccacattatctttgtccagtccgctgttgatgggcatccgggttgattccctggctttgtgggttgattcacatgctatcgtgaagagtgctgcgatgaacgtaggagtgcaggtgtcgtttggtagaatggttccttttcctttgggtagatacccagaaatgggattgctgggtcgaacggtaattctatttttagttctttgaggaatcttcaaactgctttccccagtggctgagctaatttacattcccaccaacagtgtatcagcatggtgacgtgatttggattcaggcagtctgactccagagctgtatcttaactctaaagctctgtgtgctactgcagtggttttcaaacccgagcaagaccaggtgtggtggctcacatctgtaatcccagcactctgggaggccgaggcaggtggatcatttgaggccaggagttcgaggccagcctgggcaacatggtaaaaccccatctctactaaaaatgcaaaaattagccgggtgtggtggcacatacctgtggtcccagctattcgagaggctgaggcaggagaattgcttgaacctgggaggctctgagaggttgcagtgagccaagatcatgccactgcactccagcctgcgcaacagaatgagtgagactccgtctcaaaaaaaacaaaaaaccctagcaaggatcagaatccccagagggctaggtaaaacacagattgctgggccccatctgattctgtaagttcctgattctgtaagtctagcttgagaatttgcattttgtggtgacactggtgcccctggtccaggaagcacgttttgagaaccatgagctactgtaataggaagcccaaatgaaattggcctgaaataacgagatttatgatctcatataacaaagaagcctgtaggtaggcagcacagcagcacaggagttgactaagcagttccacaatgcctgcagggaccccatccctctccttcaagccactctgccatccatggtgtgtctcctgtgtccctaggctccctgcatggccacaagatgactgccaaggctccagttggcacacactgacagtgccacatccagcagcagaaagagggcatctctcacttgctgtgtatctctttaagagtgaggaaacctttcattgattccctgcctcccagatttccctcatatctcattggccagcatggtgatatgtgaccctgcccagagaaaccagccaagggccaattaggattgaccctctggggctggggctggggctggggctggagccggggccagccttacctgaagtaggtagcacagggaggagagtggctacaggaatgaaatcagagtaccatttaggaaaggactgggaaagggggagggatattgggtaggcagacaattggttttgctgcagaaataagtggaacacagggaaagcataatgcccatgcatttttgtcatcgtgcttaccagctttgttttgtaattacctgaatcaggacttagctttttgttctctaatcatgcccacctttgaaactgtgcacaaagtcccagtaccacaagaactctgaatcttgttggaataccaagtattctgtctggcaattcagggaaacttgagttgggtgatgaggcagcagtctgaaggttagagtgcgaggtctttgagagcactcactcactctgcccagaaacacctgggtctcacccatctctctgctcctgactccctcccccctcctcctacccttccttgcaaaggctgtttccccctctgagggctgttcttggatgaaaggagaggatgccagtcaagtgcttacccccaggggccagcgcatggtaagtacttaagaacgtggcctctgctattaacatattaaatgtgactttttatgtatgtatgtctgtatctatgtatgtatgtatgtgtttgttgtttttagagacagtcttgttctgtcacccaggctagagtgcagtggtgtaatcatggctcactgcagccttgatctcctgggctcaagcaatcctcccgcctcaacctcccatgtggctgggaccacaggtgcatgccaccgtgcctggcaaattttttttttttttttttagttggagtctcactctgtttcccaggctggagtgcagtggcgcgatctcggctcactgcaacctctgactccctggttcaagcgattctcctgcctcagcctcccgagtagctgggactacgggcgcccgccaccacacccggctattttgtatttttagtagagacggggtttcactgtgttagtctcgatctcctgacctcatgatcctcccaccttggcctcccaaagtgctgggattacaggcgtgagccaccgtgcccagcccatgcctggctaattttttaatcattcatagagacgaggtctcactttgttgcccaggctggtctcgaactcctggggctcaagcgatcctcccacttcagcctcccaaagtgctgagattacaggtgtgagccaccgtgcccagcataaatgtgacttataataaatattttataatcctgcacccccttaccaaaaaaaatctatgaagagtgaccatcccttttgcagactgaaatttcctgaggatacctgttgctactgctcgtggccacactgtaaagccattgccctttgagattgcaaagggctgaggaatgcagtgtgggctctgagccagactgctgagtgcaagttcttgatccatcttgggctccctgttttactttgggcaagccacttagccttgcatgtcttagtttccgtatctgtaaggtggagctggtaatggtactgtcctcctaggttgttgggaggattcgaatgcatcaaagcacgtgacatgcttagacacccctcccccccaacccccaacagcacccgacccaaagcagcactcatacaatatgtatcagctaatctttgaatattctgtgccagttcattcacaggggactataagctccctgtgggcaggatttatgtggtttttgtttactactgtgtcccagtgcctgactcagaatagacattgtttacatttgtgtgtgtggatgaaaagaaggatggtaagagcctttcttaatttcttttccttcagctgcctggaatttaaactctgacctgagctgattactcggtattttgaaggaataaagtggacctgactgactctgagggcagcatgtgataagtgcagctgattgttgagcatttttgtgagccacaagcatagtgctcaccataaagatctcacttggccaggcacagtggctcatgcctgtaatcccagcgctttgggaggctgaggagggaggatcgcttgaagctaggagtttaagaccagcctggacaacacagtgagacccttgtctctacaaaaataataataaagctctcactgactcttcatcccatttcatagatgaggaaactgaggcccagtgggagcacctgcttcttcttacaagaggagatctaaagtagtggttaaggccggccgcggtggctcatgcctgtaatcccagcactttgggagaccaagtcaggtggacctcctgaggttgagagttcaagaccagcgtggctaacatgttgaaactccgtctttaataaaaataaaaaaaaaagtagctgggtgtgatggtgcacgcctgtaatcccagctacttgggaggctgaggcaggagaatcccttgaatccagaaggcggaggttgcagtgagctgagatcgcatcactgcactccatccagcctgggtgacagagcaagactctgtctcaaaataaaataaaataaataaataaagtagtgggtaaaaactggaaccttggagctcctctgcttgggttagatccccaccccagcactttcttcctgtgtgacctccagcctatgacttattcgttgaacttctcatctgtaaaataagaatgctgatagttcctccttagagggtcgctgtgagggttaggagagagaattcatatgtagcacttagaacagcgccttgtgcagtgagcattccggttgtggttgttattattagccagccaaagccgttcagttgtgcttccaaagctggctggaagagtccagcgaccgtgtttaatcattaagctgcattgcctctgtgagctagtgcctcctctgcacgggccaaggagcccgcctttagattgtacggttctgaatgaagcatccaggcgcaagctcagggcaggggacggtgtgggcacaagtccagccctggctctgtcagtgaacaggtggcctgtgcctgaatccgaggtaataggcgagccgcctttgttacctttgagctttctttcaagcccattcagactcctcagaccacgtgtctgatgagtaaggaggccttttctttccctcccccaaagggaatgttggcaaaacagctttctttgggaacgcgcctgttcacgacgaccagccatctcctggggaactccggtggctggctggcgtgttcctgcggctgttgaataagtcgctgttaggagctggcacggcaggttcccgtttccgcattccaggcacccacagcgggctgggggcgggcaccactgaggtcggcctggagagccaaggcaggtggcctcgccctgggaggaccagggacaggaggagtccacctggggctcccctgacagccacctgcccactttgtgatcagagccgtgttcggggagtctttcaggtgagcgatattcattaaatttggcagtgacttgcagagaaagttcatcatgtttcttcctctccggagttagacagttagctttttttgttttctctttttttcccccctcttctccctgaaatgtttacctgtctgctcctaactgtgaagaaagagtgggccgggtgttgacggactgagaaaaatggaggacatttctcccaagagaaggaatcggtgactcttttagtgagttgagctcctgctggatgcagacttctgtgccggggctgggggcgatcccagcctggtgtagatgagctctgtggtctcgcctgagtccgctttcctctctgggcctcagtttcctcttcttgtgaaatgggaactagcagcagtgcccaatgagtcatctatgtaaactgcttcaagcctgggcactgagcggtgctcaagtcccccctccccaaccccaggcccccattttccctgtgtgacctcatctgtgacctctcagctgcttgcttgctgtaccccagctgcactggcctcctgctgttcctccctcggagactttgccctggctgttccctctgcctgcaacacttcccctagaattccccagcgccgcctccctccctccttccctcaagtctctgttcagatgtcaccttctccatgaggcctctctccttattaaattgcaccttctccctcaccctcgcccttactctttgctttatttttcttcatagcatttacttccacttgacatattttgtctatgctctgcttcccagctctaggctccatagaagcacaggcacttttgtgtccatccttgtagaaccgttcctggcacgtggtagatgcgggctaaattgtgatatgaatgaatttatatcaggtgcaacatgatccaaggatgggtggccagccccgtttggggtttgaggagggtgtcagcttttccaggaacctgtggctgtgggtgaggcggcatgtgcagatgcctccccctggtcacccagtggctctctggcacctgcctgcagcatccagccctctgccttcctgtcctgcaacccctgcagtctgtgcagcccaggcctggtagtgactcatctgggcagcctgggtgcctgtggcatggaacaggaaagcttggcctagtaagtggagaggatgtcaggttcatttaggtggagaagactgtgtggaagataccacccatatacacacatctcatatgtatctccagcccctgcttgctgttcctgcagggggaggccagggagtgcctgggaagtagcaattaaccagccaggcacagttgagccatctcccctgctttaatgggtaataattcttgctctggggctgaacaagttttaattaaatggtgagcgcgaagaatctgaccgtgtaatagctgacacgtcctcatctattttctagctcccggtgtcagcaattgattctgtaaaaatatcctgggcagggcttccctgagctccatgagtgaggtcagtggccttcttggatttctcccagcatgaggcaccaggggactgaggtgctgatggacttcgcgccgctgtagcatacatcatcgcatgtcaggacctgctgctattttaagaatgtgcagagcaggagggaagctcttctgcaacatttaacacatatgtcccttgagctcccagtgcgggagtttggggttgagttgaggactctcctattacacttatttcatgtaatgcctgagccccaacactgtgggcacagtagttctctgggccacaggttccttatctggaaaatggggataattaatagatgattaaacgagaagtcaaagtgagatcaggtgactcagtgctgtgtctagtgcatagatagcaaattagatttaagaaagacaattctttttaagaattcttttcaagcccctttttaatattttcggtctgtccttttttgtgcccacccccgaccctggttccacccctgtgtcagcatcctcccgcaatccttcacccatggtaacaatcaaggactgtatgtatctttccacatttttctccatggttatataatcctataggagataatattacacttattttcttgcattttgctcttctcacatagcagtgccatgtggaatgcctctgagtccttgcatagtgctgagatttgctctttttagtggctgcgtaacacacagtggtgtggatgcaccataattgatttggccaagacatcactgataggcattcccttttctcctagagtttttttttcccacaaattattatttttattgataaccttctttaattagattgcagatgtccaacctgtttggccaccttgttaagttctaggcctttgagaatgaatatgaagtaacagtagtgcaatgatgcctctcgtccagatagaagatgtatttttggagggttctcaccaagtccagcactgtgttgaaccaaaaagcattttttaaatgcttttttattattagaataattaatagattcatcacacttagccagattagttgtgtttaatgtacttattatgaaataagagtgaaaggacagttcatgttttttcatattaacaatcttggttggaaatcagaatgtgcaagagatttttgttgggatttgtgattgattgtgtgtttctttttcaggtggcactttagttagggactatgcttgtgttcaggaaacttgtacagcgttgtacccagatagagatttgttctagttgtctattgctgcaccacaagccacccctaaacttaaggccttaaaatgacagcagtttcttatttcttgtgaacctgtggttgactggggctcagcaggatggttcttctgctggtcttgcttggggtctgttatgtggctgcagtcagagggtggatggggttggaacattcaacatggctttactgaaatggcaccttgggaatggctgggtccatgtctgtccatagtcttgggacctctcctttcatgtggcctggccagcctgtagctggacttataacacggcagctgagggcttttgtgagccttcttaaggcatagatttagaactggctccacatcacttctacttcattctgttagttaatgtgagttgaagagtcagcccagattcagtatgggagggatatcacaaaacaagttccaggaggtgtggtccactgtgggcacctttctatcctggctaccatggggttcattttctcatgtaagaagtgcagagctcagcaggctaaggtgacgctcaccttaccctctctctgctgctccaggtcaccatccttagcctcatattcataaaatggttgctctacctccagcctgatatccttgtgatgggcaggcagaaccagggctctaaggaaaggagacagcacctgtatcaagaagccaaagccttccctgaaatctttagcagacgtctgcttgtgactatttggctagaactttgtgacatggccactccttgctgcaaggacatctacagtttttcagttgggcccattgccaccctgagcaaagggtcaataaggaagaagacggagagtggacatgttgggcattcacctgccagcactccatccagacagccacagaagtggtgggtaaacagagacagcatacattcacttatcaactgtttagtaaattcctggcatgggcagggcactgggcttctcccaaagactgtaagagtgtgcaggattatttgcagacattgaccagatcattgctgagctcacctctctcatatcagtgttcgaagttagtctaatgataagaatagtagccagtctcattaagggcttaccttgtgtagaggaactgttacgaatacttttcataagccaactcagtgaatcttcacagtggccctatgaaatgggcattgttatcaccccctcttctcagaggcagaaacagaggcacagagaggttcagtaacttgccatatttcctctgacaagggcatggtggagttgagatgcagtctctcctggtctggctctggaggcatgtactgaaccatttggctatactgctttggttaattacaggaaacatttcttgttgaaatgaatatgtaattgacagcagaataaaacatgaaacaaaaaccacttactactccatcccctccactcctgcttcctgcctcattggtctcatctgtcagtaacctagtatatattcttcctcacctctttctaaatgcattaatttttaaaatcttttgagagtctgggtctcactgtgacacttaggctggaatagaatggttggctaatttttttcatttgtttgtagagatgggatcttgctatgttgcccaggctggtttcagactcctgggctcaagtgatcctcctgccttggcttcccaaagcattggcattacaggcgtgagccaccatacctggcctgtattaactttttaaagatggcctttggacacacagaattggattaatcataatgcgtggtgcatgatacactggcatttttggtccatgaaaaaaatattcatctatcataatgaacagccgttagcccactgtttgcccaagaacttgaatattaccagtaacttacatgtacctatgtggtacttcccattcactttcctgcctgctctctcagaagtgaccaccatcttgaattttgtgtttattattctttgctttaaaagaatgatttttgaactttatcaaaatatggctgagtgtggtggctcatgtgtgtaatcccagcactttgggaggctgaggcagcaggatttcttgagcccaggagtttgagaccagcctgggcaacatggcaagacctcatctctacaaaaaaatttttaaaaattagccaggtgtggtggcatgcacttgtggtcccagctacttaggaggcttaggaggaaggattgcttgagctcaggaggttgaggctgcagtgagcctggttcgtgccactgcactgtagccagggcgacagagtgaaaccctgtctcaaaaaaaaaaaaaaaaaaaaaaagaccaggcacggtggctcacacctgtaatcccagcactttgggaggctgaggtgggcagatcatgagcttaagagattgagaccatcctggcctacatggtgaaaccccatctctactaaaaatacaaaaaaattagctgggtgtggtggtgcgcacctgtagtcccagctactgaggaggctgaggcaggagaattgcttgaacccaggaggcggaggttgcagtgagctgagatggtgccactgcactccagcctgggcgacagagcaagactccacctcaaaaaaagaaaaagaaaaagatatactgtacatagttttctgagacttgcatttttcagctaatattatgattctaacattgatttagactggtaccactgggactcatgcatttttatttactgccatgtgagtattccactggctgaatataccatgtttttgttttaggcatttccatgccaatggacattttgttttcagattttttgctgttcacaggctgctgtgaatattgttacacttcctggtgcacatggacaagcatttctttcaggtatgtactggacatgagatttctggattgtaggttgtgatcatctttagctttgccagatattactgagctgctctttaaacatcccaccaaggatgagtttcttttattctgtatccttgtcacatttggttttgtaaaacttttttacttttgccagcctagtggataggaaatgaaatctcattgtggttaatttacccctgaagactagtaaggcagaatatcttttcattcatgtttctccttctggatattgcttgctcatcacatctgcttctttttctttttttcttttttctttttttttttttttttaggtggagttttactcttgtcacccaggctggagtgcagtggtgtgattttgattcactgcaactgcacctgctgggttcaagcaattctcctgcctcagcctcacgagtagttgggattgcaggcacctgccaccacacccagctaatttttgtatttttagtagagacgggatttcatcatgttggccaggctggtctcaaactcctgagctcaggtgatccgcctttctcagccttccaaagttctgggattacaggcgtgagccacagtgcccggccacttttgcttctttttcctattgaattgtaggtgttctttatatactgtggctactaatcctggggtggcagcctatttaacctaataaaagtttatgatcctcgggtcatcctttctgtagttgttttctttcccctgctattctccccccaattccatgatacctttttgtgtacctccagctcacagtgatccactctttgaaacagtcctcaacttctgggcatttgtatatgttagtacagatgtatgactgactatacctgttctacccactgtgccgttgcattttggtatcagatgtatctgttaggattagtttcaactacaggctggccatggtggcacacacctgtaatcccagctactcaagaggctgaggtaggagaattgcttgaatccaggaggcggaggctgcagtgagccgagattgcaccatgcactccagcctgggcgacagagtgagactccatgtcaaaaaaaaaaaaaaaaaaaaaggattagtttcaaccgcatataatttagtttcaacaaagtgacagtggcctaagcaagatagcttatttctctctcacgtaaaggagccccgtaatagacaggcgagcctgtgttctcatcagggacccaggctgcttccaccttctggctccaccacctgtatcctgccacctcatggtatgagacagctgcccaagctctagccattacgtcccaggaggcaagtaagaaaaaaggagacttaaattgtacacagcaagtctgcttacacctttgcccagaatttaatctcagtactatatgtagctgcaggggaacctgggaaatgtagttttatttcccatggccttattcttagctaaaatttagatttgattgctaagtgaaaaggggagactcaatattggagtaggcagccggtaatgtcactagttctgaggtgttccctagtggagctgaaaggagccatcagacaccaggatggtacctgtagatgatgccctccccacttttggttctttgattaattacacagatatttatggagcacctgttttgtacaggcactattctgggaactgggaagagagtaatggaaaagcaaacggggtctccacccttgcagagctcgtattttaaaagagcagctagatagtaagcaagtcagttacttagtgcgtcagagataaggggtgtgaagaaaaataaaggaggctgggcatagaggctctcaactgtactcccagcactttgggaggctgaggcaggaggattgcttgagcccaggaggtcaaggctgcagtgagccgagattgcaccgctgcgttccagcctgggtgacaggctaaaaaaaaaccctgcctaaaaacaaacaaacaaaaaaaaaaacaaaaaaaaagctttacctcttactaactcatgaccactctgttttcttctatatccaccaccacccaccctctactgtattattttaacgctaaatagttgagtatctgcaagataaggattctttaaagacataatgagaagaccattttaatcatgacaataattaacattaattgcttacatcatctggtatccgcacagtgttaacatctcagatcatctcataaatatctttctagaattggtttgttccaatcaggacccaacagggctcaccattggagttggttcatctgcgtgtgaagcctcatttaatctatggcttctccctccctccagctcactgcaacctccgtctcccgagttcaggcgattctccacctcagcctccttagtagctgggattataggcatgtaccaccacgcccagctaatttttttgtatttttagtagagacagggtttcaccatgttggccaggctggtctcaaacccctgacctcaaaggatcctcccacttcagcttcctaaagtgctgggattgcaggagtgagccaccacacctggcttgatttttctttgtttttctcttgcagtttatatgttcagaaaggccatgtcatttgtcctgtatatgatcaggcctggatctgaccgatcatatccctgttgcagtgtttaacttattcttctatctctgtgtttcctataaatgaatcattggatttgcagagtaggtgaatttcaggtttgagatgtacacacacacacacatacacacacacacacacacacacacacacacacacactgtttcttttttggcaggcagggctagccgtcctcctaggtgttgctgtgtatccgttagggatgtaaagctgggggcccctttctgtattggtgttagtggccgtggatgaccattgctcagagccattatttcatttggggtgtacaaaaattgtgctgttgtaattctgtccacctcttcatttattagtgggactattcctctagagagaacctgcccctcatctattattcagttatcctgagggtactggctcttttgaacttttgtttgccttagaaatgactattgaacaattgggctggtggtttctaatctgttgtgtgttttttttttttttttttcctgcagagattcaaatcttccttgtttttatgttcattcatttgacatttgccggtctccaccactgctcataccctgtcctgagcttgccaataaacagatgaaccagtccagtcatctcattgtgtgggcacggctgctccaggccttacctttgaccgggtggggccttgcgggtgtttgtcgaagtaatgagactgtggacattcccatctttctctctctttcccctgtcgtgcattgtcagaccttatagtctttggtgagttcctgctctacgccaaggaattagtcctttatgcttggggcaagaggtttttgagtatttggatttcttctgatctgaaactccattcctagacaaaagaacaataaagggctctactccattgcagaggcaagccctggtaacctggccaggggcgagccctgaccccagccactgttgtctgggtcataaattcttgagagcagtagcacgcttgaaatcatttagatgctttgggatcagttattcattatattgcacgatatctaagggcctctttgctgctagagattacaacacattcctcctgggggcagaagatttattgtgcagtgatgtgcaaactcattcattcattccattgttaacttcttcattcagcaaatatttactgaacatcacatatgcttccagtgccggggacggagcccgataaggtctgtcctcctggagttcattgtttaggttgggggacacagtcaaggaagaagtaaacagattaataagataattccagatggggatgaataatgctgtggagtcaggaaagcagaatggcgagagagacacgcctggaagtagaagggattgtgggaggctggaaaactggggtcgttgggggagagcctcctcggggtggtgacatgccagctgagagtggagtggtatgcaaaggtgccagccttgtgaaagatcagggaagagctttcccagcagagggaacagcaggtgcaaaggcgctgaggctggaatgagtttgacgtgtgaaggagtgtggggtgggggtgggaaggagggggagggcaggagacgggggtggcgggggagcctggtgagggtgtgggtttgattcagagtgtcctcccatgccctctggctacggcgtggagcatagattgaaggtgggagtggaagtagggcagtgaggggcagcctgttttgcagtgaggagagaagtagagtcccggatgagagtggtggcaatggggacaagaagtgggtggcccaacagaacttgtttagggattggtcatgctgggtggtgagtgggttgaaaggtttaccagcgggttcaggctttggtctgcaggattttgtggtagtaaggatagccccagtcccctttaacatgggctgaggttttctttcaatttttgtatttttagtagagacaggttttccaggctggtctggaatcctggcctcaagtgatccttctgcctcggcctcccaaagtgctgggattagatgcgtgagccacacccagcctctttctctctctctctctctctctcttttttttttttttttttttgtagagacagggtcttgctgcattgcccaagctggtatcaaactcctggcaccaggtgatcctcctgccttggcctcccaaagttgctgggattctaggcgtgagtcactctgcctggccaagagctgaggttttctactacacacatctcgtctagccctcatatggtagactcttaatgcccatttcaaccccgaagaaactgaggcccagagaagtgaagtccttaatccttgtcacataggctgttggggctggattggaacgtggatagccccacccacagtccgaccacgctctcttcttctccctcactccaactacagctgttaattcatggtattgacacagcctgtgtccaggaggagccaaatgtcagtgtcatacatttctgaagtcaagaggggatcaaatccacatcagtggccttttcaccattcccactaacctggattccaacacaccttttatgacagtaattattacagggcagaaaacggggactttcgattgctgaccactttacacgaggcccagataaggtgtgcatctaggccctggactttgagccctgagcctgcttaactgattgggctgaaagtgttctcacccatcaaatcctccttatcaccttctccagaactccagctgtaaagggagctcaccactcacagggtgtgtgttgtatgtgacacctcagccagccaaatggctttacttggtgtcctctcagaagaggtgtgacctccttctcttagcgtggtctcctgtggaaagtcatgttgagtttggtgctgcctctgcttgcgtttaggcctcttgacaaggattgtatgttgatcaattttttaaaagtgtttttaaaaaatctttactgctttaaaatgtacagaagccacacgctggctgtaacccgttccaacagcagagcagtatgtagagaaagcatgggccggacacgcctgtaatcccagcactttgggaagcctaggtgggcggatcacctgaggtcaggagttcgagaccagcctggccaacatggcgaaaccgcatctctactaaaaataaaaaaaattagccaggtgcagaggcatgcgcctgtaatcccagctacttgggaggctgagacaggagaatcgcttgaacccaggaggtggaggttgcagtgagctgagatcgcaccactgcactccagcctgggtgacagagtgagactccgtctcaaaaaaaaaaaaaaagcatgaagatctgcttcattgtcttgacctagtggcctggctttgcccccaggtcctgcccagatgcatattaagtgcacacttccaggtcttggtctgtgcagtggattgtttgttaagagccagggtgcctgggttcaagtcctagtattgctgtgtactgactgtgtgaacttgggcctttacttaatctccctgtgccttgatttctccatctttaaaatgatggtgatgatcccaacctcataggcttttaaggatttaccctgttaatgtattaatatgtaaaagaatagtgcctagcatgtttgttaagtacaggtgatccttgatggggttatgttctgatgcacctgttatacgctgaaattacccttaagtcaaaagtgcattcacacctgtcatcccagcactttgggaggctgaggcgggcagatcacttgaggtcaggagttcgagaccagcctggccaacatggtgaaaccccatctctactaaaagtactaaattagccgggcgtggtggcaggtccctctaatcccagctactcgggaggctgagccaggagaatcacttgagccctggaggcggaggttggagtaagccgaggttgttgccactgcactccagcctgggtgatagagcgagactccatctcataaataaataaataaataaatgcattcaatacacctcacctttcaaacatcatagcttagcctagccttccttaaatgtgctcagaacacctgcattagcttatagttggggaaaaataatctaacataaagcctattttatagtaaagtgctgagtatctcatgtactgcttattgctggcctggaaaaagttcaaaatgcaaagtacattgaaattgcagccatttgtgccatggtaaagtcaaaaaattgcaagtcagagactgtctgtactcatgtcttaggttgtttttttttttgagacagagtcaaaactctgtcatccaggctggagtgcagtggtgcgatctcggctcactgcaacctccacctcccaggttcaagtgattctcctgcttcagcctcccggtagctgggactacaggcgtgtaccaccacacctggctgatatttttttgtattttttgtagagacggggtttcaccattttgcctagactggtctcgaattcctgagctcagcaatctgcccacttcagccttccaaagtgctagaattacaggtgtgagccaccgcgcccagccagctatttttttttattatacatctatgtgagtaccgcagtttgttttatagacatactctaggtatgccgtcctgcagattacacttgagtagtctagcttaagagatccccccgtgtctgtgggtcaaggtctgtggcattctttttaatggctacatagcattccactctatttgttgcctgttgttgaacatactggctgttcccatctttcattattggaactctgaacatctcacacacaaaaatcatttgtttgcttcttaagtttttcttgggacaaagtcctagagttgcaattcctgaaacagagtgtctatttttaaagacttgtggctgggcgtggtggctcacgcctgtaataccagcactttgggaggccaaggcgggaggatcacctgaggtcaggagttcaagaccagcctggccaacatggtgaaaccccgtctctactaaagatacaaaaattagcctggcgtggtggcaagcgcctgtaatcccagctactcaggaggctgaggcaggagaattgcttgaacgcgggaggcagaggttgcaatgaaccaagaatgcaccattgcactccaacctgggggacaacagcgagactttgtctcaaaaaaaaaaaataataataataataaagacttgtgatatttattgttgacttgtattccggaagggtccagtacaggagttctggtttcctggatcctcaccaacgctgggctcacactgcttctttccctccccacacttttttttgtgtgtgtgtgtggagatggggtcttgctctgttgcccaggctggtcttgaactcctggcctcaagcgatcctcccccatcggcctcccaaagtgttcggattacaggcatcagccaccatccatggcccagaatgctttttaatctttgctatttgggtaaccaaaagttaccaaagtaactaataatttacatttatttgatttctggtgaagtttattgtatatgtatctgtttattaatcatgtatttcctagttaattacctatttctctggggggtatttttatttcttgttaatttgtggaagatttctttacatgttgaagatatgaatcattttgttatgttgcaaatttatattcctaaattgtttatcttttagtttttttttgttaaacattcagaggcttcttaatttttgtgttgttagagctatttttcctttgtgttttttgttttgcttgttttatgtatgctttggctttcattttaggatgagataaatattttcttcctagttattttacggctttgtttttacatctaggatctgatatttattttggaattggttgtgagataaagatctagctcctgggccaggcgcagtggctcacgcctataatcccagcactttgggaggcagaggcaggaggatcacttgaggccaagaggccaggagtttgacaccagccttggcaacatagtgagaccccacctctacaaaaaataaaaaatctagctgggtgtggtggcgcacacctgtggtctcagctactggcaagactgaggtgggaggattgcttgagccctggagttcaagattatagtgagctgggattgcgccactgcactccagcctgggcaacagagtgagaccttgtctcttaaaaacaaatccgtccaggcatggcggcccacgcctgtaatcccagcactttgggaggccgaggcgggcggatcacaaggtcaggagatcgagaccatcctggctaacatggtgaaacttcgtctctactaaaaatacaaaaaattagctgggtgtggtggcaggcacctgtagtcccagctactcaggaggctgagacaggagaattgcttgaacccaggaggcagaggttgcagtgagccaagattgcgcctctgcactccagcctgggcgacagagtgagactccatatcaaaaaaaaaaaaaaagtccaactcccccacctcagtagtcaatgagttgtccctatcctactgactaaataatccgttctttcccactaatatgaaactcaaacttactgtgagccaggccctggtctgtcaagtttacctttctagtctcctgccgtaactcaatgaagcagattgataatattcccattcacagcaagaaaaccgaagcacaaagaggtgtcgtttcttgcgtgacatttcacagcttggatggggcagagcctggctggaaatattgcagatttatttaataaccagcccccttatttgtaatatgttttcagcagtttttcctgcagtttcttgccaaatctcccttttgtccacctgtaacagcctgcagcactttccctatgctggagttctatgttttaggcctgttctctgcctctgccctggccaagacttctgtggcaatgtcagatgccagtggaggctgctggcaggcgtggacgtctcagatgtctgatccttcaggagccccctccacggggccctggctaggcagtgaccaggatgtttctgaatccccttaagttaatggtggccacttaggcagcggaagtgtcatgaaagactcttctgtccccatggctgggccaaaccagggaagacgctgacatcaagcacaattgagaacaagcagcagtaggcaatgttctggggctattaattcatcctgggggaaaaaacctcacagtggattaaattggtttatgtaaagtgctgagaagagcccagcctgggcaacatgatgaaatcttgtatctacaaaaaatacaaaaattggctgggcatggtggcatgcacctgtggtcccagttactcgagaggctgaggtgggaggatcacctgagcctgggaaggttaaggctgcagtgagccgtgattgtgccactgcactccagcctgggcagcagagtgagacccggtcttaaaaaaaagaaaaaaaaaaaaagaagagtggttggcacatagtaaacactcacatacatattagtcattgttcctctgtttccaaaggtaggaagaaagttcccaggaggtgtgcttagaatgtgggtaggcagataccactcgggtatttcctgagcacctatgccatggcacacaagtgctggggccacagttagggctcaggacaggcacggcccccacgctcttggagctgacattctagaaggcaggtggatcctagatacaacagatacatgacgtaatgttatgtagtgagaagtgctagagattgagggaggctactgttttattagaagtgaccaaggcaggcctctaaagaggttgcctttgagtcaaggcctgaaagataaggagccagccgtggaaggcacattccaggcaggaccacagatgcaaaccccaaggctggagcttccagagcttgttcccagcaattcacagatgccactgtggcaggagggcagcgggggagaatggcaggagatggcatcagagagggagccaggtggaccttaggttcttttggttgaaaataacagaaacccaccttagacccacctaagcctcaaagaattgtgagatgcctcctgaggcctaggacttgcactgtctcctggcatcaggatcgataggcctgaggcctaggcgattttctgtctccatctcccatctctgtctcttctttatctctgctttcttctctctttgggtttctccaggcatttggccacctcattgctccttcttttatgggatttccaggtcgcaaccacagatggtcacctctcatccagtgagctatggctggagaataagcatggccatcccacccgtgcctgtgtacatgcacagttttcattcaaaggggactataaggccaggcacagtgactcacacctgtaatttcagcactttgggaggctgaggtgggcggctaacctgaggtcaggagttcaagaccagcctggccaacatggtgaaaccccatctctactaaaaatacaaaattagccaggtgtggtggcgcacgcctgtaatcccagctattccggagattgaggcaggagaatcgcttgaacctgggaagcggaggttgcggtaagctgagatcccgccattgcactccagcctgggagacgagagaaactctgtctcaaaaaaaaaaaaagttggagaggggactctaggaagcctgaaagacccactcccctgctgtcctggcctagggtacatttcccttttctcatatgaagcaacatcatatcatggttaagaacatggccacattggccgggtgcagtggctcacgcctttaatcccagcactttgggaggccaaggcaggcggatcacaaggtcaagagattgaaaccatcctggccaaaatggtgaaaccctgtctctactaaaaatacaaaaattacctgggcgtggtggtgcatgcctgtagtcccagctactcgggaggctgaggcaggagaatcgcttgaacccgggaggcagaggttgcagtgagccaagatggcgccattgcactccaacctgggcgatggagccagactgtgtctcaaaaaaaaaaaaaaaaaaaaaaaagagtgtgaccacattgtctggattcagagctctgccacttgctagctgtgtgaccttggactcatcacctcactcttggggctgcagttttctcacctgtaaaatgaggatgctaaagccttttacttcagggtgtggttcagagcattagacaaacttaggtaaaggactcagtctgagcctgatacacagtaagcactcaaagtattagttttcatcatcatcgttgtcatccttacttttccttcctgaggccggatggtgctctacagttcaagataggacttgggaataaagagcgtaggattgatctcagctctgtgaccttgcccaagtgagtaacagctttggtttcttcatctgcgtagtaaggacaagaaagagcttacagggctcgatcattggatgtacgtttgtcgtctgagatttggggcgactggaaattcaagagatcccaagttccctgctcagtgcagccccagctcctgatcacacttgaacgcgagctgatggcgggcttggttctagggcctgcctcgcctctgtcatgaaggctgcgcggggcccttctgtgccgagactggcgcttgctccccacaagcccgtctgctgctccctccgctgcgagccctcccaggtctgatccgcctgtccccagtaccccggcatgcggcacttttccttcttctcttgtgaaaggcagatctggaagaagcttctggggaaatgctgtgtttgtgtctggttatatctattccccagacggtgattcttaaacctggctgtgggttggcatcacctggggaatcttggtaacagttgggattctctggcttcactcctggagcatctgctcccgcaggtggagaggaagatcatctgctggtttggccgccctacaaccattcaccattcttttggggttttcctgttgggaactgctcttcctccatcccgtccgttcacttactgagaccgctgtgtgcaatttattatttaccccaggcactggggatatggcagggaatctggaatatgcccttgaaactggaattgtgtctgtccgttagatcacagtaccgtaaggctgtcactttctgatttttataattgtactgtgatccagagattcttcttaggaaatacccacatcttgaggggttacaaacaagagcaaattaactggaaaagggaagcaaaccagtgttggctgaacaaacatgaaaatgactacaatgtttatcttcagttttgggagaattgtcatgaagactcaaccacagtgtcatcctttgtacagaataggattctaatcaggagaccagtgctcatgtgcacagctttgagtgtgaagatctaaaaattttagttggtaggatgattacagattattttcatcttcctctttacagattattttcatcttcctctttaaacttttgtatatttttcacattttctagaaggaagttttagaaacagaagtgggaaaaaaaacaacttaaaaaaagccccgggccaggcgcagcggctcacacctgtaatcccagcactttgggaggctgaggtgggcggatcacgaggtcaggaaatagagactatcctggccaacacagtgaaaccccgtctctactaaaatgcaaaaaattagccgggcatggtggcgggcgcctgtagtcccagctactcgggaggctgaggcaggggaatcacttgaacccaggaggcggaggctgcagtgagccgagatcacaccactgcactccagcctggcgacagagcaagactgtctcaaaaaaaaaaaaaaaaaaaaaaagccccactgttgtggaatgtcctggtctacctggtttggacttagaaatgccttaggagtagcctgggcagttcaggtcattccttatcttcctgccatagggattggttcaaggaagggaggaggtgagtcagtccaatcagaattaagacaggtctttctctggagctcccaggaaagaagaggagctttcttcctatggaggtgccaagttgtagagtgtaagcttaatgctgctgggggcctggggaccatctttgctcagagggtcgagtggaaaggagatggaaataattcattacagacaaattctttgggtaactgaacttctcagtaatgggagccaaaacattggccctttttcccctcaagtcagtttgaattgggtctctgccacttgcaaccgaaagagtcctaagtaatacagtaattttagtggaccctagaatctatatttaaatttaaaaaattctctgccaggcgcagtggctcatgcctgtaatcctagcactttgggatgccgaggtgggtagatcacttgaggccaggagttcaaaaccagcctggccaacatggtgaaaccctgtctttactaaaaatgcaaaaactagccaggtgtggtggcaggcacctgtaatcccagctactcagggggctgaggcaggagaattccttgaacccgggtggtgaaggttgcagtgagccaagatcgtgccattgcactccagcctgaggaacagagtgagactctgtctcaaaaataaaataaaatataaaaataaataaataattctccagaaatgatttgtatgaatcagatatttgagaaccactttgctagactttcctgagtggcggttcttagctttatgtgatcaacagactggcctggggaacttgttaaaatacagcagctctgttccacattgctggagattctggtttggggcctgaggcctgggtatctgcattttgaacaccatcctgggtgattgcatacacttcagagtgtgtgtatgcacagaggattcttggccgggcacggtggctcacgcctgtaatcccagcactttgggaggccgaggtgggtggattacaaggtcgggagatcctggctaacatggtgaaactccgtctgtactaaaaatacaaaaacaattagccaggcgtggtggcggaggcctgtagtcccagctactcaggaggctgaggcaggagaatggcgtgaacccgcattctcagcttacaatcctatccatagagggggcccaggatccttctcaaatgaatgaaagtagagtttaagtctgcagtttttttcctctttggaaaaaaacattcctttcctgcccatgacccagccttgcacactggccgctaaacctggcgtatcgcatcatgtttcaggaggaatttggtcagatctgtgcactttattaggataatggttgacccagtgtgtacctccccaggtaactttggaaagagctggatagagttcatgaccaattcggaacaaagtctgctcttaggaggaattttgctaatagtgggaaatattcaagagggtaatcactgacttagttcaaggtaatttaaggtgaatgcattcctcatgtgtgtgtgtgtgtatgtgtgtgcatgcgtgccaaacttacttgaggtgaaggaggggcgaaagcccttttactcgaatgaaaggaaatcttttgaattgacctatcggttcagaaaatcccttttcaaatcttcccttgagcagctttgcttttgaggcccctgaaagctgggaaagaaggggctgtgaggcctgactgactcctcgctgctggctgtacccccaggcacgtgtgattttgccattgtctgaaatcttgctttccccagaatttgtgccccatgctgagttcctacagctcagccaccaggaattagggcatgggttagccaggattattcaaatttaatctgatcatcgttaaacatttttgcttgcatcctccccaaaagaattttgataagcccctgtatacctccttgtacactgtaaagctaacatctaaaataagcttatggtaactttaaatttgtcttatttgtgggagaagaaaatagtacacattttgaaggtcgaatgtaattgaaatattttatgatgtggttagataaaaaaaagtttttactaccttattgagtaaagtacacagaagctgaaagcaatcatgtaaatttttccctgggaattttttcttggtggatctagaaaaattcagtggtcctgaaaaatgttccctttgaacaaatcagagccactaacctatactgctttgacattcatgatcctactatggttcagaaaatcctatttttaaagcccagtttcatgtttggcagaaagatacttaagtcagggaaagacaggcaagtctgggggtttaagtagctttttattgttcactaaaggctacttccccgaaaccaatattgatgttgtgtgtttggagtcctggaggtttacacacctctcggtcgtgctccttgggaaaatgggggagtgcacaacagcgggtgggcagtggggaaggagacaggctggtttgcagccagatcagttttaggaagaggaacttgtggatgttgaggatctgaacattgcttcccttgaaaacactgttttcaagatactcctgtatctgttaagtttccgtaaacccctagtgataagcacatccaagcgtgaagcctctcggctttaagaaccaggcggtttcatatggagtgggaagtccagaggtgattaggttacagaagttgtcaccaccaccgcctgtatgtgtgtatatatacacacgtgccataaaagtcacccattcagaatatgcaattcaggctgggcgcagtggcttatgcctgtaatcccagtactttgggaggccaaggcaggcagatctcttgaggccaggagttcgagaccagcaaggacaacatggtgaaaccctgtctctactaaaaatacaaaaattagccaggcattgtggtgcatgcctgtagtcccaggtacttgggtagctgaagcacgaggattgcttgaacacaggaggcgggggttgcagtgagccgggatcacaccactgcactccagcctgggtgacagagtgagatgctgtctctcaaaaaaaaaaaaaaaaaaaaaggccaggcatggtggctcacacctgtaatcctagcactttggcaggccgaggtgggtagatcacctgaggtcgagagtttgagaccagcctgaccaacatggagaaaccccgtctctactaaaaatacaaaattagccaggtgtgttggcacatgcctgtaatccccgctactcaggaggctgaggcaggagaatcgcttgaacctaggaggcggaggttgccgtgagccaagatcgcaccattgcattccagcctgggcaacaagagcaaaactctgtctcaaaaaaaaaaaaaaagagtatgcaattcagctgtttttggtaaatttgtgaagctgcataactatcaccacaatccagttttagaatattaccaccaccccaaaagatatccatcttgtacctctttgcaggcagtccttgcttccacgcctaggcccaggctaccactaacctgctctttgtctctgtagatttgcgtttcctgaacatttcaaatacatgcagtcatacagtatgtagtcttttctgtaccaggcttccgtcacttagcataatgtttctgcgcttcctccaggtgatagctcatatcagtcgttcatttgttcttattgctgaataatattctattgtatgggtaaaccacattttgtttattcgttaaccatgaatggataatttcattaccattattcgttaatggatacttggattgtttccagtttgggctagtatgagtagtgctgttatagacatttatgttcaggtctttgtgtggacatgttttcatttctgctcaggagtggaattactgggtcatttggtaactctgtttaagtttttaagaaactgccagattgttttccaaagtggctgcgccattttcatagatagggtctcatgatgttgtccaggctggagtacaatggctattcacaggcgtgatcatggcgcactacagtatcaaactcctgggctcaagctgttttcccgcttcagcctcctgaatagttgggaccacaggtgcgtgccaccgcccctggctggggtccagtatttctttatcctcaccaacgcttattgttacagccatcctggtgggtgtgcagtggtatctcattgtagttgtgatttgcatgtctctgatgactaatgctgttgatcatctttttatgtgcttattggccattcgtgtatcttctttggtgaaatatgtatttgtattgtttgcctatttcttaatcttgttatttcattgagttgtaagagttcttgatatgttctggataacactcatcagatatgtagtttgcaaatattttttcccagaaaatatttttatttttttagtcatgcctttggaagtataaaagttttgtttttttttttttttgagactgagtctcactcttgtcacccaggttggagcagtggcacaatctcggctcactgcaatctctgcctcccgggttcaagcaattctcctgcctcagcctcctgagtagccgggattacatgcacacgccaccatgcccagctaatttttgtatttttagtagagatggggtttcgccatgttggccaggctggtcttgaactcctgacctcaagtgatccgcccaccttggcctcccaaagtgttgggattacaggtgtgagccaccacgcccaccctaatataaaagtttttaattttggaaattccgtttatcaattagtcttttatggattgtgcttttggtattatatttaagaactctttgacccagtatcatgaagttcttctttcatgttttctcctagaagttgcatacttttaactcttgcctttgaatctatcattaattttgatatcatttttgtgtattacataaggggcctaaatttatctttttgcgtattaatatccaattatcccagctccatttgttgaaaaaaagaccattttcctccactgaattaggtagcactatggtaaaagtcatttgattattaatataagggtttgtttcttctgatctattggtttaaatgtctatcctactgctagtgccacagtcttcattactgtagctttaaagttactttagaaatcgggaagtgttaagtcctcaccttgttttgttttccaaaattgttttggcttgtgtgggtcctttgcatactgacaagttttcagatcaccttgtcaatatctgcacaaaagcctgctgggatttgatagactgtgtgttgactctacatgtcaatatggtgagaattgccatattaatgtttagtcttccagtttgtgtacaaagaatgcttctctgtttatttagattgtctttaatttctttcagcttttcagtgcttgtagctttcagtgtacaagtctacacttatgttaaatttattcttatgtattttttttatgctattgtgaatggaatttttttttcttttttttcttttttcttttcttttgagacaggatctcactgttacccagtctggagtgcagtggcacaatcatggccttttgggctcaagcagccctcccatctcaacctcctgcatagctaggactataggcacatgtcaccatgcccagctaatttttaatttaatttaatttattttttgagacagagtcttctgttgcccaggctggtgtacagtggcataatcacagctcactgcagcctcgacttctgagctcaagtgatcctctcaccttagcttctggagtagctgtgactataggcatgcatcaccatgcctggctaattttttttttatttttgtggaggcagggttttgccgtgttgcccaggctggtcttgaactcccaggcccaaacagtcctcctgcctcagcctccaaaagtgctggaattacaggcatgagccaccatatctggcctaaaaagtatcttatttagtggagatatttggagataggatgccacactttgtatgatttcagtcctttaaagttttttttaccttttcttttgaaataatttcagtctcacaagaagttgcaaaaatactacaaataggctgggcatggtggctcatgcctgcaatcccagccctttgggaggccagggtagttggattgcttcagcccaggagtttgagaccagcccaggcaacatggcaaaaccctgctctataaaaaattagctgggcatggtggtgtgcacctgtaatttgagctaccagggaggctgaggtgggaggatcacctgagcccagagggatcaaggctgcagtgagccatgattgtgccaccacactccagcctgggcaaccgagtgagtccctgtctgaaaacaaaaaacaaaaactacaaatgtttatctacatgtgaaagaatgaagttggacccttacctcacaccatatacaaaaattaactcaaagtagatcatagacctaaatgtaagagttaaaattataaaattcttagaagaaaacataagattatatatttgtgaccttgagttaggcaatggtttcttaggtgagaacaaaagctcaaacaacagaagaaagaacaaaagcacaaacaacagaagaaaaaaatagacacattggacttcatgaaaatttaaaacttttgtgatgcaaaggatgccatcaagaacataaaaagacaaaccgtagaatgggagaagataattgcaaatcatgtctataaaggacttatgtgctgaatatacaaagaactctcacaacttgacaatataaaaacaacccaatatagaacatgggcaaaggatttgaatggctctttctccaaaacatccaaatggcctataagcacatgaaaatggctcaatataattatcattagggtaatgctaatcaaaaccacaagattctatttcacaccaactaggatggctagagccaaaatgatgggcaataacaagtgttggccaggatgtggagaaattggaaccctcatacatggctggtgggattgtaaaatggtgtagccattttggaaaacaatttggcagttactcaaaaaaatatatacatagagttaccatatgatccagcaattccactcctaggtatatactcaaatactaatatatgttcacataattacttgtgcatacatgttcagagtagcgttattcgtaaccccagaagtgaaaatgacccgatgtccatcaactgataattggctaaacagaatgcgatatagacccacaatggtatattactctgtcatagaaaggaatgaagtactgatacagactacaacatggatgaaccctgaaacacacatgaatgaaagaaaccagacccaaaagagcacatcttgcttcatcccatttatatgaaatgttcagagtaagcaaatctacagagacagaaaatagattagtgtttgctgagggctggggatgctgtgaacaggaaatggaaagtgattgctaggagtacagagtttattttggagatgataaaaattttctaagctcaggttgtggtgatggtgaattacacacttttaaagggtaaatttcattcattgacgtttgatgtgattgttggtgtgtttggattaacatctgtcatttttgctgttttctgtatgcctcacatcttttttcctccttttattctccctttattgccgtctttctgataagcagatattttctagtgtttcatttttattttgttgggttttaaaaaactttcttttttttttttttttaattgggtctctagggatcacagcatgcgtctaaatttatcacagcctacttcagattaatattaaaacttagttctagttaaatatagaaattttgctctaatatagtttcattttcttttccctcttttgtgttattattgtcacatgttacaagccccacagtatggttttataattattttatgaaatcttacatcttttaaatcagtcgagaagaaaagaaaaaatgtatttatgccatcttttatatttgcccatgtatttaccttttctcatgttttttctttcttattgtaaattggagttatatggcctcttttcctttcagcctaaaggatttatgtaatatttcttacagatcaaatcttctagcagtgaattctctcagtctttgtctgggaatgcctttattttgccttgattgattgattttggtgcagggtcttgctctgtagcacaggctggagtgcactgaactgcagcctcaacctactgtgttcaagcgatcctccacctcagccttctgagtagctgggactataggtgcgcgccaccacactcagctaattttttttttttttttttgagacagagtctggctctgttgcccaggctggagtgcagtggcatgatcttggctcactgcaagctccgcctgctgggttcacgccattctcctgcctcagcctcccgagtagctgggactacaggtgcccaccaccacgcctggctaattttttttttttatttttagtagagacggggtttcaccttgttagccaggatggtctcgatctcctgaccttgcaatccgcctgccttggcctcccaaagtgctgggattacaggcgtgagccactgcgcccagcctcacactcagctaatttttaaattttttgtagagatgaggttttgccatgttgctcaggccggtcttgaactcctggaccctagcaatcctcccaccttgacctcccaaagtactgggattacaggcatgagcaactgcacccagccaattttaaaaaaaaatatatttttttttgttttgagacagagtcttgctctgtcacccaggctggagtgcagtggtgtgaccttggctcactgcagcctccacctcctgggttgaagggatcctcccgcctcatcctcctgagtagctgggcttacaggcacccgccaccacacttggctaatttttgtatttttagtagagatggggtttcaccatcttggccagggtgatcttgaactcctggcctcaagtgatccacccgccttggctttccagagtgctggaattacaggtgtgagccaccgtgcccaacccttttttttttttttaatttaaaatttttctttagtgatggggatctcgctgtgttgcccaggctggtctcaaactcctggcctcaagttatcttcgtacctgggcttctcaaagtgctgggattacaggcatgagttactgtgcccttctccaccttgatttttgaaggatagttttgctggctatagaattcttatttgacagtttttttttcttcagcattttgaaaatgctatcctgatgtcttctggcctccattgtttgtggtgggaaatgagctgtcatttgtactgatgctccctgtgtgtagactttttcttttcctactttgaagcttttctccttgtctttgtctttcaacaatttgactatgtttaaaaacaaaacaacacgaaaaccaatttgactacgttgtgtccagtgtggctctctttctatttattgtatatggagtttcttggccttcttggatgtgtaaactaatgtgttccatcagatttgggatgttttgggctattacttgttcagatttttttttctggcactttctctctcctctcataggactcccattatgtctgtcttgatgcctttgatgatgtccctcatgtctctgaaggcctgtttattcgtattcaatctttcttacagattatttaaattctgtacagattatatactttttttgatctatctttaagcccactggttcttttcaaatctgccgttgagcccctctagtgaattttttatttcagttatcagaatttccattgctttttttctaatttctatttattatttctactttcctttaattctttaaatgttattttatttatctttgaacatacttataatagctgtttgaaatgtaacttgtaagccgtctagaaggcaatttctattaactgattcatttcctgagtatgggtcacattttactgtttgtgtgtctcacaatttttctttcattctttttttttttttttgagacagagtctaactctgttgcccaggctggagtgcagtggcacgattttggctcactgcaacctccgcctccggagttcaagcaattctcctgcctcagcctcccgagtagctgggattgcaggcctgcgccaccacgcctggctgatttttgtatttttactagagatggggtttccccatgttggccaggctggtctcaaactcctgacctcaggtgatctgcccgcctcggcctctgaaagtgctggggttacaggtgtgagccaccgtgcttggccatgagccactgcagccggcctttttttttttttttttttttttgagatagggttccactctgttgcccaggccagagtgcagtggcaggatcatggctcttctcagccttgacttcctgggctcaaatgattctcttgcctcagcctcctgagttgctgggactataggcatgcaacaccatgcccagctttgtgtgtttggcgagggtgtgcacacacatgcatacgtgtagggatggggtcttcctatcttgtccaggctggtctcagactcctgggctcaagcgatcctcctgccttggctttccagagtgttgggattacaagcgtgagccacctcacccagcctcagtttgttttgttgttgaacactgaacattttagatcatacactgtagcagctgtggattctgatttctaccttccaggccatggttgccgttgccatttttctccttttgttttgtttactgagtatcctgggctaattctttggagtttgtccccttgtggtatagactcttttctcttttaaaaaaattgttttaattttaagcataacttactaggggttgcctttggttcagcatggtttagtggtcagattaaaggttgtgctgaaacaccttgagccaataaagcttccatcctttgccaatggatctgtgtctgtgggttggggaatattttcaaagttcagtttcttccttttttttttccaagcagttcctgagtcggccccagccattactttctgcctggccatctggtgtctcccttgcacactctcaaggcctcatgttgggccagggatgtgtggacagcaagggccccctctagtctctctggagcttgtgtgcaaccttgtatatatgcacattgttccagaccagcagggctgcatgggaccttaccaaggccttgtgtggctatctcattccctggatcttcctgctaaatttctggctggtctacaggcctgctgctggctccagccagatcgtaaccacagtctagctgtgatgttggtcttccccatttgtttggcactaggccccagtccagccacaaagttttcatggcttgctctgccttggtcaaactgatggagctggtgcgtgtgatgggaggaaccccaaattaaacgccacatgttcccactgttcttacttgaagttcagcgtttatttattgagtttttgagtaactgcttcttgggtagttatatgcctttggttgatttctagaatcctcaaatggttgtgtttggcaattctgtctactttcattgttgattttggtgggaaatacttttctgagctcctctccacttccccattccagaagtctggttagcagctttgacttttgattttctctttaatttaagacatacccagaagtctttccaaatttccaaactttaaatatgtagctctagctacatatttcagtcaatttggaagctttttgagttgttgggtttggtttttgttttttaattttactttttagtatgaacaattgcaaacatataagaagtggagtttatattatccaggtgtgaccaagcttattttgtttatattctgactttgcccactcctcagcccattgttttgaggcaagtaccatatatcatatttcccttcacccataaatatttcagtaaatagttctaaagggagaagaggctgaatgcagtagttcatacctgtaatctcaacactttgggaggtggagacaggatggagtttgagactagcctgggtaacatggcaagaccccatctctacagaaaatttttttaaaaattaggcatggtggtgcatgcctgtggtctgaggctaaggcaggagggttgcttgagcccgggaggtcaagactgcagtgagccatgttcatgacactgtactccagcctgggtggtagagcaagatcctgtctcaaaaaaataagataaaaggagaaaatttctctttagaaacacaacggtgatataattatcacagctaaagcatttaatagtaatttctgtctttctttttgtttgtttgtttgtttgttttgagacagagtctcactctgtcatccaggctggagtgcaatggcccgatctcagctcactgcaacctctgcctcccaggttcaagtgattctcctgcctcagcctcccaagtagctaggattacaggcatgtgccaccaccacgcctggctaatttttgtatttttagtagagacagggtttcaccatgttggccaggctggtctcgaactcctgacctcaagtgatccacccgcctcagcctcccaaagtgctgggactacagttgtgagccaccgcgcccggccagcatttaatagtaatttcttaatatcataaaatagactcggggaaccttgaaaagtaagatgcccagtcaagtgaaatcagattctctgagagtgaggcctggacatcagcatatattagactccctcggtaattgtgacatgcagctgaggttgagaaccattgagttagatagaattctctatacccttttccagaattgttcatttctcatgtaaatgcattagcatgaaagtattctgatagaaaattatctgttttggggaattcaagaaaatttctttcctaatatgggatcaatttttatggccatcccatggatagtttataaagaattaatctcatctgttttctggcaaggggttctatatgaacttttaaaatcaaatttgctagtttgtattactcagattctctctagccataattttggtcaattttatctgttactctcctgaaaagaaatatgtttgcttcccacagggattatgattttatcagttctttttatatttctagtttttttttttttttttgagaaggcgtctccctctgttggcaggctggagtgcagtggcacaatcttggctcactgtgacctccgtctccctgcttcaagcgattctcctgcctcagcctcctgagtagctgggattacaggcgcgtgccaccatgcccggctaatttttgtatttttagtaaagatggggtttcaccatgttggccaggatggtctcaatctcctaacctcatgatctgcctgcgtcgttctcccaaagtgctgggattacaggcgtgagccactgctctgggcctggtttttgttttaaacttctagattcacattttctttgtaactttttgtcatgaaatgttgaggaaaagaacagcagactgtcttctacccacctccctgcccccacccctagtccctgcattctagattccttaattgtatctggaatttttctgatgtcggtatcatcaaatggtgttgggtgacattaaattccacgtcaaccctcctgaaacacgcccctgtctctccaggcttcatgtctgggacccagcgttctgtgtttgggcattgccacctcctgcccacctcagaagcacctgccaccttcctgatctttgtgtgcggtgggcacttgggggaaatgtgtatgttagaattggcagtctgtgatctatcacattattttgcacggccaaagtgtgtgccgggctcagttctccacccactctgctagtaccatttggttagacacagacagaatccccctgttcccctgccgtgtgatccaccgctgtttttttctgaaataagtgctaattggtttttaattccacttggattttaatgctgcccactgcagccttcatccagaaacactgatctgtttgaagaaatgttcctcaggaggaggaatcggcactgcagggagctggcaggttccgtccttcccagcttgccacagtggcctcgggcacctgccagccacacatgtccccttgcctcgggctcagtgagggatgctttgcagtgacttgctcatgatggcaaggacaggtttggacagagctccctttcctccatgtgtggagagctactgggcctcagttcatggaagctggaggaatgttatgagaccagcatggagcggtgggtctcagagtcctgatctgggatccaggagcattcctgtggcttctggatgactcctgccgtgcccacctccctctgcaccgtccatctggggcaggctctgttctgtagtctgttatgggagagactggatcctgtcctgccagccatctgggatggggaggtgattttgatccgcctccaccctcctccccagtgttttcttctgtttagaacactgttcagaactgtcccactccagggctgcctccaaaggcccacactcattcatgcccacttactctcagcctctgtccaggcactgggggaagggaaaggcagatgtcagtctggcaggtggaaaacaggagtgcgtggaggcgtgggggtggagcagctcccgcgagggcagaacaacagtggagtggttgggaacacagacttctggggcggacaggcccagtttccacgggtggctggggaattcggtgcaggtgacctcgcccctctggacctcagttttattagggctgccatcacaaagtaccacaccccggtagcctaaacaacagaaatttattatctcagagtttagggggccagaagtctgagatcaaggtctgggctcgggctgggttggttccttccgaggtctatcaagaagactttgtcctgtacccctccctcagctgctggtggtttgtgggcatttttggcattccgtggcctctgctgcagcaccctgatctctgccctcatcttcatgtggcattctccctgtgtgtgtccatgtggaagttcccccccaccctttttttttttttgagatggagtcttgctctgtcgcccaggctggagtgcagtggtgtgatctcggttcactgcaacctccgcctccctgggttcaagcagttcttctgcctcagcctcccgagtagctgggattacaggcgcccaccaccatgcctggttaatttttgtatttttagtagagacggagtttcaccatgttggccaggctgatcttgaactcctgacctcatgatccacctgccttgtgctcccaaagtgctgggattacaggcgtgagccaccgcacccggctggaaatttccccttcttataaggacactggtcatactggattaggggctcaccctacttgatcccaactttacttctgcaacaatcctatctccaaatgaggccacattctgaaacaccaaaggttaggacttcaacacgtgaattttagggggacacagttcaactcatgatggaaaaaaataggaatgataattacccatgtactagggttgttaaactttaaaaaaaaaagttatttatttatttagagactgggttatgtgactggctaatttttgtatttttggtagagatggggttttgccatgttgccaaggctagtctcaaactcccgagctcaagcgatccacccgcctcagcctcacaaagtgttgggattacgggagtgagccctggcgcccagccacttacgttattgattcatacaagtaaagcctttagctcagttcctgtcacatagtaagtgctcagtaaatgttagtttcattaatgggttctgatggcctcatctctttctttctttctttctttctttttttgagacagtgtctagctttgtctctaggctagagtgcagtggcgcgatctcagctcatgcaacctctgcctcccgggttcaagcgattctcctgcctcagcctcccgagtagcggggattacaggcacgcgctgccatgcccagcggatttttgtatttttgttagagacggggtttcaccatattggccaggagggtctcgatttcctgacctcaggtgatctgcccacctcggcctccaaagtgctgggattacaggcatgagccaccgcgcccggccggcctcatctcttaatgggacaattgcagtcctaattagctcactgcttctattcttgcctcctctattccatttctggttttcattccaaagccagaaatgaaatcatgtgatataccccatgtataaagccttcagtggtttcccatttctagcattcagggtctttgagtctcaggtaaaagaaaaccaaacccaaactgtccgaaggaaatggagataacatgatggaagtccagggataacctgctttaggtgcagcttgagccagagctcaaataatgttattactaatgctgggtttttctccttgatctcccaagttggttccagtctcaaattggttgtcctctgatagttatgattgcagcaactctggcctgacatcaggtctggtggaaaaagagagagtgagttctttttttcttgtggaactttctgcagaaattctgaagctcactgtgagttggcttgggtcatgtgtccagctgttaaccattgctatgaccagggaggggaaggtggtcgattggcttagttagacctgggtcaggtgtggaaccccattgacacatcatgtcctgaaagtggggatcatctggattgcaaatgaaaatagtgttctttttaggaacagagacaatggctgctagggggaaacaaatcagttactctctaatatgctccagtgcttaaaataactttcaaaaatcctgaccaggaatggtggcatatgcctgtagtttcagctactagggaggctgtggtgagaggatcacttgagctagctgttcaaggctgcggtgagccatgatcatgccactgcactccagcctgggcaataaagagagaccccatctctgttaaaaagaaaaaaagaaaagaaaaaaaccttataggccaggtgtggtggctcacgtctgtaatcccagcactttgggaggccaaggcgggcggatcacctgaggtcagggatttgagaccagcctgaccaacttggtgaaaccctgtttctactaaaaatacagaaattagctgggcatggtggcgggtgcctgtaatcccagctacttgggaggctgaggcatgagaattgcttcaacccgggaggtggaggttgcagtgagctgagattgtgccactgcactccagcctgggtgacagagttatactgtgtctaaaaaaaaaaataacacaaataaataaaaaacaaaaacaaaaatccttatcatggcttataaggtcccccgtgatgcagccgtgctggccttgcttactgcacaccagccagtctttcatattcatttctcaaatatgccacactttcctccggcctttgtgtgtgcccttccctatgcctgaaatgcttttcctgactgcttgtcttctagccttctcgttcttatccctcagatcttagcctaaatgtcaagtcctcaaagaggcccttctggactgtcctgaatgtaaactaggccgcttgttattcctgcttggcaaagcttcatagcagttatcataatatttaattacacgttatgtttgtctttacatgtttaatgcccgtcttcctcactgggctggctgtgagtcccaggaggtcaagcccagacctgttatttatttatttatttttgctttgcattgcatccccagtacatactaggtgtgcaaaacaaaacaaaaaacctttattaaatgaatgtggttgaaatagaattgttactcatttaaaattttggttagtttgtcattggactagagcagggaacaaagtctggccggaagtttttaaaaccctggcggtgaaatttcaaagtgaaaatgttactcgtaagttaaatgaattcatactgcagccatattttttcaggctggctggtattagtgatgcccaaagtgactttccttttggagtcttggggccagtggagatggtatatctcccaacaataaaaatttcaccacgttaagtggagtactacgattaacacacatttttaattagcctcttagtcatctcctatctgaagaggccaggacaggcattttaatacttggttattggactacctctaaggagctctcccatgctgcagataccgttctgaatctctgcagtttgtcaaggttcctgcagccggaagctgttttccaggccgctctcttctcactaaagccacagttctttcttcgcactaaagccatccgttcagcttctgtgcagagggaagaggtccctgaactggcatgactgcaaaggcggttgaaccctcctctcctgcaggatgtggagggcatggaggctgtgccgtggatgggtggtgcatctcagaagagttagcttcagcagtcattgggtaaagcaaacatgctagagagtcacaactaccttcacgttctaaagatgtcgggtattagtgaggtagaggtttggctgctgtaacagacccaggatagtagtggcttaaatgcgagggcagtttatttccctcctgtgaaacagtttgagagtgagcagcccaggcccctgccgtcttgttgctccctgttcctggggtgttgctttcatctgcatggtccagaatgattctccattattgccatgtgtgcagcctggcctgtggtggggaggatgtaagaggagaggttatacctcctctttttcaggcagttgtgtttttttttgagatataatttatgtgtgttaaaatttgcccttttttaaaaatttattcctcccccacctcccatgcttttttttgtttgtttgtttgtttgtttgttttttggagaatggggtctcactctgttgcccaggcaggtctcaaactcctgggttcaagtgatcctcctgtctctgcctccctaagtgctgggagtgcaggtgtgagccactgcacctggcatatttgcccttttaaaacatttgatggttttcagtgtattttccaggctctttaatcatcataacaatctatttgcagaacatgatcaccacctcaaaaagaaaccctgaacccattcccgcttccctgattctgccctgtgattttcccatcccttcagcccctggcaccactaatctttctgtctctatgtatttgcctgttctggacatttcatgtaattggaataatgcagtatccatttctgtctggcttctttcactgagtgtcatgttttttgttttttggggttttttttttgcagagacagagtcttgctctgttgcccaggctggagtacagtggcgcgatctcggctcactgctacttcgcttcccaggttcaagcagttctcctgccttagcctcctgagtacctgggattacaggcgtgtgacaccatgcccagctaattccttttgtattttattagagacggggtttcattgtgttgcccaggttggtctcgaactcctgagctcaggcaatccgcccgcctcagcctcccaaagtgctgggattacaggtgtgagccatcacgcccggcctgagtgtcatgtttttaaggttcacccatgttgtgcatgaatcagtacttcattcctttttgggttggataatattctgttgtacagatagaccacattttgcttatccaggcatcacctgatggacctttgggttgtttccacgttttagctattatgaataatgctataaacattcatatataagtttttgtgtaaagatatttttcagttctcttggatatctacatacttaagagtggagttactaagtcatgtggtaactatgtttagcttttttaggaataaggcagagatacctagtgtgtgtgtgtgtgtgtgtgtgtgtgtgtgtgtgtgtcatgggccctttgacatctttttctctcagttgtgtttttaagtttataaaatgtaggatgacaaaggaaactaattgtcttaaaatgtagtttttgaaatacgaagataaatttgtgatatagtgtggcaaaatccattggcagatctaactaccataattccaaagtaacaaagggcataagtgctattttgagacgtttgtaagaactgtgggctgggtgtggtggctcatgcctgtaatccctgtgctttgagaggctaaggtgggaggatcacttgaggccaggaatttgagaccagcttgggcagcatactgaagccccatctctacaaaaaatttaaaaacttagccgggcatggtggtgtgcacctgtagtcccagctacttgggagactgaggtgagaggatcccttgagcccaggattttgaggctgcagtgagctgtgattgtgccactgcattccagcctgagcaacatggggagaccctgcctcaacaaaataaaccaacaaaactgcaatgtgataatatacctgtggtttctgttggtgacaaatttgtaagcatgaaaactatagtttgcctatattcctaattgaagaaaatgctgaatttctgttagagattagtgaaaataaagaggtaattctgcccccttccccccaaattagtggagctcctgaattctatcctgcttcaaagagcatgacccagaagttgcacacatttccttcactccttccctgtgatcctgattagttacatggcgacagctagctgcaagggaggctgggaaatgtagtcctcattcaagtcaatcaggtgcctggctaaaatataggggttccgttattaaaggaaaggggggaggataggtattgggggacaagaagtcaatactgtactgcagtacacactgtgcagccactttctcacccaggtcagaacacgtgttcttctcataagcacctgccagaggagttagtttggctttggggaccatggtgtatgaaaaaaaagcgcatctttttttttttttttttttgagatagagtattgctctgtcacccaggctggagtgcagtggcgcaatcttggctcactgcaacctccgcttcctgggttcaggtgattctcctgcctcagtctcccaagtagcttgggttacaggcatctgccaccatgcccagctgattttttatattagtagagacggggtttcaccatattggccaggctggtctcgaactcccgacctcaggtgatccacccacctcggtctcccaaagtgctgggattacaggtgtgagccactgtgcctggccaaaaaaaaaaaaaaaaaaaagcgggaggggggcgcatcttgaagcactaaaacgcctctcagcactctgagagtgctgctcgcatgacgaagaactgaggctgcctgagggagtagcgtatgcctgtcccccatcccacactcacaccagagcaaatgcttaggaagtggaatgctgggtatctgttctgcttaaattatttgtcctttagtgaggggtaaggggatcctagttgaagttatgagaggtaaacatttgatacaacctctctgtgcctttttactgtgcagtaagatgtgtggtttggcttctcagatgactggatggtgatgctatattggaactcttgattctatgtgtcagactccaccctcgatcacccaaggcagaagagggattgatgtgttggcctggagtcccaggaagatcagcaacagagagtgggcagctcaggcctccggcagcaaattaacaggacatgggcagcccagaggcaaagtgacttccccattgtcctggttgtaaaggctgaagggtcatgatgctgatctaacattggtaacagctggactttattgagcacttcctgggtgcctggcagtatttgttttcatcaaccttatgagatgggtcctgccataccccactttcctgatgtgtagggactcatcgacctcctcaagatcatatagttacttatttgtggctgggcatgatggcttgcacctgtaatcccaacactttgggaggccgaggcaggaggattgcttgagccaggagttcaaggtcagcctaggcaacatggtgagatcccatctctacaaaaaaattagccaggtacagtggtacgtgcctatagtcccagctactcaggaggctgaggtgggaggatcacttgagcctgggaggttgaggctgcaacagcaagtcatgattgtgccactacactccagcctgaacaagagtgagaccgtgtctcaaaaaaaaaaaaaaaagtattgattcatggcagaggtggggtttgaacagagagtctggttctagccggtactgtcatgagggcagagggtgagatgcaggagcagaaggcttgacagcctggacagaggagtttgtgttttccttcatgctttcatttcgtgaatctttgttactgatgatgacttttgagttgacgtgattgtgccatcccagcctcccctccctctgttctaacacccagtggtacatccccttccccaacagcaccatcagacacacaggtggctcttgtggaatctctccattccccattattctaggccagcccttctcccttatcctagttttaaacatgaatttataaagggtagttaatttgtggccaggtgtggtggctcacgcctttaatcccagcactttgggaggctgaggcgggcagatcacgaggtcaggagatcaagaccatcctggctaacatggtgaaaccccacctctacaaaaaatgcaaaaaaaagtagttaatttgttactcagcaaatctctacggtgcctaccagactccagatctgggctgctggacacaggaacatcgttaagcaaatcccggccgtcgtggaactgacagcctggaggggacgcaagagacttgggcattcaacagataacttcagagtcccaactgcagctgtgatacataccaaacaggaaacagagagagagcgaggagagcatattaatgtgcggaacccagggcctgacccggggaccaggaaggaggatggcaaggagggcttcccgaggaggcaccgtgtaggccgagcctagagctgaatggtggcagagagggaacagagcacttccagggggaactggaaagccctagacacatcaccccagtcctcactcccactgaactctgaggagacggctgcaagtcgaggctccccacccaccagcacgtcacagtgtgtccaggctcagggtccccatctgtaagatgggagtgatattggtcatggtgcccatttcattggtggatgtcactggtggattaaatgagttactatatgtaaaactttagaacagctcctggcctgtggcaagggctctataggtttaattagtcattaaaattaaaatttgtatgttgtaggtctaaagatggctaataaaaaatcaccccacccaggccagaatccaagttagaggactgcttgacagggactgccagacacagacttggttgtgggagtcaggggtgcagcctctggctaccacccccaggaggcattcagaaatggggggttggccgggcgcagtggctcacgcctgtaatcccagcactttgggtggccgaggcgggtagatcacttgaggtcaggagttcaagaccagcctggccaacatggtgaaaccccatctctactaaaaatagaaaaattagtcatgcgtggtggcgggcgccagtaatctcagctacttgggaggctgaggcacgagaatcactcgaacccaggaggtggaaattgcagtgagctgagattgcaccagtgcactcctgcctgggtgacagagcaaggctctgtcttaaaaaaaaaaaaaagaaagaaaagaaatggggagttggtctcacaatgagtggtgggggccagggatgctgactgacctatgcacaggagtgttccaccaaacatgcccacggcgccccaggggagggttgtcctggaggggatttccttgggtcttcgtcttgttgtacgtctcttattgggtttctctccctggggtggaaagatggctgctcttggagatgcaggctgcccctgaatgccctgatcactgactccaacttgtaaaatatttgtaagatgcccccgcactgcagcactgggaagcagtgccggccagtctggcagaaagtgtgaaacccagtaagtgatctgctttatcaatccaggttcttgggttgcaagcaacagaaatcaactcaggcaccctgaggccctaaaagggtcgagcagctctggggtgtctctcagtggatattcttgggcacttttttagggccctgcattgaagagcttagacactgcagcccgcctcctgggtgagaatcccaacctcactccttattcataagcatctcaagctttctgtgcatcagtttgtcggctataagatgggaatgagaaccggagggttgctttgaggattcagtaagttgatatttgagacgtgtttagaacagtgtgtagtgtagagtatgtggctagatatatactagctgctattatttttattaagtgctgtggttattactattagtattatttttttgagatggggtctcactctgtcacctaggctagagttcagtggcacaaacacagctcactgcagcctcaacctcttgggttcaggtgatcctcccatctcagccgcctgagtagctgggactataggcatgtgccaccatccccggctaattttttgtatgtttttatagagacagggtcttgccatgttacccaggctggtcttgaactcctgggctcaagcagtccacccacctgagccttccaaaatgctgggagtacaggcatgagccacctcacccacctagcctaccattattatttttattttattaaaaaaaattttttttatgagatggaggcttgctctgtcgcccaggctggagtgcagtggtgtggtcttggcacactgcaacctccacctcctgggttcaggcgattcttctgcctcagcctcccaagtagctgggactacaggcacgcaccaccatgcccggctaatttttgtggttttagcagagacagggttttgccatgttagccaggctggtcttgaactcctgacctcaggtgatcctgaggtcctgccttggcctcccaaagtgctgggattacaggcatgggccacttcacccggcctcattattatttttattggcagcttgaaattgaaatccctgagcaagaggaagccattggcccagtttggatcaggtgggtgggcaggtcccatgattggcagtcccctccacgcccccccccacagaagtaggaggaacgagggagaaacagttgtccccaggaaaagtgggctgctgtcaccagaagttggggcagagactccaggctccaggcaggtccagagcgcccgtgtcctccatgctcagtaactggactcaacaaatgttggttacttccctgctttgtgccatggcctctgctgagcacagaagacacagaagggacagtgatttgcacggtctcctcctcacaggtcctgtagtccagaaattgagggtcctggttaaaactaaatgcctagaacagtgcctggcctttaggaggtccttcgtaaatgtttcctcaatgaataaacacacagggaagtgcaagagttttatggaacacacaacaaaagcatcccactagttattttaaagaaatccatgtttgtacctttagtctccaggatgaggttcagaggggtgtccatgcacacagtaggtgtttaataaatggggactaaattatctaataggtgcatggtcctgcagcctgtccggtgtgacagttgagggcagacccagagttggggagctggctgccttctctgttgaacaggatgtgcagacgtggctccaggatgcatctctgtggaatgcagtcgctaatacaaatgagcttcctcacgtcacaaggcatctattatgtggacagttgggcgatgggccgtgggactgggcgggctctctaggggagtttcagagccacagttatgtttagggccttcctttggagagggacttttccccatgaatgactcttaataacaaagataataatagccaccactttccaggtgcctgagctgtgcaaagggattaacccatggactcctcacaatggcccatgaagccagtatatgatccccattgtgctgaggctcagagagggaaaataacttgcctgttgtgtgcacagcaagtgagaaattgaggtgggattctggccatggtctcttgctccaaagcttgggtttgtccttctataccatgcacagcctgttttctctctctagtactaagtttaaaacaatattatttttattaatttgcatatagtacaatatttaaaaataaaaaggccaggcacggtggctcacacctataatcccaacactttgggaggctgaggcgggaggatcactggagtccaggagttccagactagcctggacaacatagtgagaccctgtctctacaaaaaatttaaaaattagctgggtacggtggctcagggctacagtcccagtcactcgggaggctgaggtgggaggatctgcttgagtccaggaggttgaggctgcagtgagctgtgatcgcaccactgcactccagcctgggtgacagagaccccgtctcaaaaacaaaaccagaaaaaaaggcagtttcccttccacacccaaacccttcacagaagcagccactgtgacctgtttctcacatctcctttcagaagtcatgagtacaagcaaatctataaacatggcagctgggctcaacattaagggtggccacctgtagcctgcgggcgagatccaactcactgcctgtttttgtatggccagggagctaaaaatgggttttacgtttttaaaaggttaaaaaaaagttaacactatttcatgccacgtaaacctatatgaaatttaggtttcgccaggcacagtggctcacgcctgtaatcccagcactttgggaggccgaggcaggtggatttcctgaggtcaggagtttgagaccagcctggccaacatggtgaaaccctatctctactaaaaaaaaaaaaatacaaaaattagctgggcgtgatggcacacacctgtaatcccagctactcaggaggctgaggcaggagaattgcttgagcccgggaggcggaggttgcagtgagccgagatcgtgccactgcactccagcctgggcaacagagcgagactctgtctcaaaaaaaaaaaaaaaaatttaggtttcactgtctataaatatttattggaacacggcccgcccatttggttgtgtattgtctgtggctgttcttacactgtaatggcagaattgagtggttgcaacagagacaagtgtgacccaccccccaaacctacaatatttgctctttggccctttacagaagaagtttgctgatccctgcactacacactttcctttagtaatgcgtgttagagacagttggctctcagcacttttcttgcgtgctaactgtgctccccaaaagcagagcccagctgcaagccgtgggcatgcccaggttcggctggcggtgggtctgttggtgcctccgcgtgcacactcactctgagcatttcttgggccctggctgcgtggcaggccgctggctgggagccagggcaggtctaggcctgccctcaggaatccacaggccggtgggtggggagagtcagacagtatcgggcagtcctgtggagggatgtattcaggcctgctctcacaggccttccttgaccctctccccatcactcccactttgtttttatttgtggcacttaaataaaaaataggtcatgcatttatatgcttcaaaatcaattctatgtggatgtgtgagcagtctctgtcctccactcctctccctgcccaccttgttccttctccccttacgtaatgatttgtattttcccttgggtatccgtctaaggtatcattatatcaatacaagcaaatatgaatatatatttttgtcttctccttccttcgacaaaaggtagcctactcagtactctgctctgcactttgcaaatgtttactgaacagtatgccctggagatcctcttattttagtgttctggtggaaactgaagggtgggtaggagttaataaggcaaaaaagaaaggtgtatcttagggtgggggaagcatgaggaagagcattctaggcagagggaacagtgtgaacagcatgcttccaggttccggggagcgtggctccctccagagcagggggaaggcctgggaggctgaggccagggaggagggggcccgtcgaggcatgaaggttcagcaaggcctgatggtcaatggaggaaccgtgcctttaattctgagctcacccgggtgtggggttctgctctgtttccttccatgccctgatttctctgtggccaagtacacttggccgtcattccatatgaccaaggagaggccaagaatgtcctcgagagagggttattggggctggttaatgatggaagaatttctcctgtgagctgcgctcaagaagtgtgacctggtgtctgggaggtttcaggcctgttcctcctgcctcctcagttctttctagtcatgagacacgggacacatcccatcagttctcatcttttcagtagacacagtcgtagtgccaaatacaggctttgtttggagggtaatgcatacaccgtgctcagttccaagttggccacatagtgagtgctcaagatgtgatagagatggctttggttctttttatagggctggtttgggctcatactttgttagtatagctcatgattaaaggtttggggattctgtgaagtgccttatgcctgtaatcccagcattttgggaggctgaagcggaaggattgcttgagaccaggagttcaagaccagcctggagaatacagcaagactcccacctctacaaaaaatgagccaggtggtggcacgtgactgtagtctcagctactcaggaggctgaagtgggaggatcacttgaacccaggaggtcaaggctgcagtgacctatgcttgtgccactgtactccagtctggcgacagagggagaccctgtctcaaaaaaaaaaaaaaaaaagagttttggtttgatcacctgagttctaatacctgctctgccacttcttgtccgtgttgagcaggttacttaacctctctgtacttgatttttgtcacttgcaaatgaaagtgataatacttgcctcttggtcccatagatgccggcaattattattattcctattatttcacagcctctgctgtacagtattgtcagatgacgcagtgccagtggtagcagcgtcgccatcatttcagcagcagtgcccttcgttagctgtaccacctcaccttttctgcaggacaccttcccgcaaatcctttcctgtcaaagggttagggtagagttgctccgtgagtatttaggaaaggaggccctggaagagaggattgtctctttagtccctttatgagtcattggccatagaaagttacatgaccacccataactgcagggaagggtgagagatggagaattttcctaatcgcctcccacacagaatataaatatcaccaccacagctgtgtgcagtacgtatttgtgagcacgttaatctatcttgccatcagagaggctggctccagcatcttacgcatgtccacgttgtggtcagtttgcaagaagtcacccgtgatatgtggcaaaacagccggactcccaacataaagtgctggaaggaagactgtgagggacacagttgtaaaggttctcgaattgtatctgtctgatcagagaaacaatttaatgtcccagatcaaagtcgagaggcaggctctgggaactgggctgtgagcagccagagaaaggcggcagaaccagtttcttcagggcaggtctcttttatctgcttgtctgattgcctggtggacactccattggctcccagaggccttcctggtcatctcctccctctggctgggtccttgatctttgcagatggctgcgtcccctggggccagggagcacctactgtgtgcctagtgctggccaaggtactggagataatcataggtaatgttcttccagcgttcaccatgtgcttggtgttgcggttacttgagtgaactcatgtaatcctcgcagtagccctatgaggtgggacagtgttaggtccattacagacatggagacaagcccagggctgctatgtcacttccccaaggtcacaaagctagttaggggcagcctctaccgtctggatcaaagcccgccatgtaaatggctccagcttttgcaggccacatgcacgtcttcagagctttctccataatggactcttttggaagaccctggcctccaagggctgtatagtggcttatggctctcccagttaatggtgcttatgaatgtggctgtggagggagagaggctggggctggacaacctgggctttcccggtgtgacctgtggcagccagaaagagggacggggtcaagcaggggcatctttgtccacccttagctcctcctggctattcaggacccaccttacaggttcctgtggcctccctgggttgtcttcctggggtcgagggttctctggcaggcataccatggtgcccttgcccctctaccccgacatcccagccaggccatgttgaaattgccttttcatttgttagttgatctatgcaaaatgttgggagggcaggggccttgcatctacttcccttggcccaatcctggctgtgcagtaggttttaaaaacacgtctgaacaaatgaataaataaatgactcatgtgatggaactaacatctaaacagaacttaacttgcagtatcttctgggcaaatgccacatctgggctagagaggcagtggagggtggtggttgaaagccgaccctggagccacgtgctgggagttgaaatccagttctgtcgcttacttgctgggtgacctcggacaagggactgcacctctcaggacctcagttttctcatctgttaagtgggataatagtaggacctgccccacggagcagttgtgaaggttacgtgagttgaaatgttaaagcatctggcacaggcactggcttaagagttagcagctgctcctaggcaccgtgcagtagcgttgaccatgaagagtaaccgagtcttagcctcaggtatgcggagagaccagctcagttccaggggagatgttgttcaccttgtgaacctaagaaacagtggtttcatccaaaaaagattgctcagacctggcatggtggctcacacctgtaatcccagcactcttgggaggctgaagtgggtggattgcctgagcttaggagttcgagaccatcctgggcaacatggtgaaaccccgtctgtacaaaaaacacaaaaattagctgggcgtggtggcatgcatctgaggtctcagctactcaggaggctgaggtgggaggataacttgagcctgggaagcagaggttgcagtgagccaagatcataccactgccctccagcctgggtgactgagcgagaccccatctcaaaaaaaaaaaaaaaaaaaaagattgctcagcactgatgaggaattgtaactgtaaccctgatcagtaagcttgcttcatacaggcatgattcgagtggagatttttggagttgcacgaaactatgtgttctttgtgggagaagttgggagaaagacccagcccggctgaatctcctgagaacaatgaggcactttttgcagatgcgctgtccttccagtctcagggagcgctgtgtgagccctgcgcagggcggggcagcgaggcggttaagggctggattccatccttactaatgtgtgaccttgggcaagtaacaccaagcacagtcaaagagaaaattagtaaatgaaattcactctgagtatagaatagagataaaatacatagaagtaacaaaacgggtggagtgagaagaagcatacatctagtaggatttccagaaataaagctagaaggagtggtggggaggcaatattagaactaatgctaaaaatgtgccataattgaagacttgcatctcaatgctgaaagctcacaacgagtgccaagcagagactggataaaaagaaatcccccagatagattattgtgaggctgcgaaacattaaggaaagagagaaaaccttggaaactagcagactaggctagggcaagtaacaaaccatctctaagcctcggtattcatttctgcaaagtgaggaaaagaactagttactatgtgaccagcttactaatgagcttggaactagtaaagatctttttgcataggtcctgacacatagcaagtgtgcattaaatgttagctgcgttactgttggtgtcataaacgttaatgacaacagtagtgattgttctgtaggctgctgtggaatatggctggtactccacagatgcctctcatgcaggcaactctgtagcaaactagagcatgtccttgtggtgatccctgaagaagagaatagtcatttcatgaacgtgactggaagtcaagatttgtggattccttcaacaaatatttctggggcctcttgtctgtgctaaacactgtttcaaggcccaggtatgcagcagagaagacagacctagtccttgctgtcctggagtacaaggtctggtggaggagacagactagaaataaacagtatttatcagaagtgattggtagtgctattaagacgttcaattattgtagcattttgggaggccaaggcaggaggatcagttgaggccagtttgagaccagcctgggcgacagagcaagattctatctcttaaaaaaattgtttttttctttttttttttttttgagtgtgggtctctctctggttgcccaggctggagtgcagtggtgcaatcttggctcactgcagcctcaacctctctagctcaagcaatcctcccacctcagcctcctgattgagactagagtcatgtgccaccatgcccagccaattttacgaagaaaattgttttagtcaagtgtgatggcacatgcctctagttccagctaccggggaggctgagacaggaggatcacttgaagccaggagttcaaaaccagcctagacaatagagagagagaaagaaaagaaaggaaaggaaggaaagaaactaaaccaggataaagtgaagtgagtggtagtggtgggaggggtgtcttagagggatgaggaaggggtctgtccgaggaggtgacatttaatctgagacttgaaagatgaaaaggagccagtcatgcacacaggtgggtgaacaagggtgagaatgtgttgggagggatttgtagtttgttccccaaagcctccatttgcttccatcctaggggtgtttggagaggatggctgtggggagctgactttggcgtctaggaagagaggtggtgggcccagaggccgggcccctccctggctcctcccagccttcccagggcccttacccagggatgcggggccacagggaagagacccttcgccccttgggtggactccctgacttcccagccaagaatgtggttgtcctttttgttccaaaggtgacccagctgcgccgtcatgcgagcaaagcggtggcgctttgtgcctgaagcccactttctccttccccagatagatcagctcaaagctgtctgccctagagaagctccagaaagcagccaagccagactgggcatgctgcttggggctgtgggggaattaaccatctcttttctttgtgtcaaaggtggggaaggtattaaagcaacagggcttcctggatagagccacagttaggagcccagattcagggcttaaactccggcttccccacttacaccttgggcaaatgccttccatgtgcctcaccttagctttcccatctgtagaatgggacagtaattcctgtgcttagaaaagtgcacacaggatgtgctacataagtgttatcaccttccaattttaactcgaggtgagatggctttctctttcctctagtttcttgtcaacagttaagacacttgcattcgacttctgtttctccacaccagcccggttcttgcccaggagcttggcgtctggcagtcagccaggcttcaggtgccaaaagcagcccctttgctggggaaaagcaggttatttgatgccaggaagctgagaattgtcaggatgtttgtcgccagcgttgggggcctgtgtggtgcctccacaaaagggactgctcttgcttgccagggagagaagactgcttcctccagggcagcttcttcttttcttaaccctggctgcacgaaccctattagaatcaggtgggcactgtttacaacgtgcccgtgcctgccttcccctttcccctcttcctgtgtaaagggcctgaggcctaggtgtggagacttttttttcttagctgcctgatgtgccttcagggacactctctgaattcaggggcattcacaatcactgaatgtagctgagaaccacctgggggtcgtgataaaatgcaggttctcattcatctggtctgaggaggagctgagcgttttcttttttctttttttgctttttgagatagagtctcactgtgtcacccaggctggagtgcagtggtgcgatctcggctcactgcaacctttgcctcccaggttcaagcaattcttgtgcctcaacctcccgagtagctgggattacagacttgtgccaccatgcctggctaattttcgaattttttgtagagatggggtttcaccatgttggccaggctggtctcaaactcccgacctcaggtgatccacccgcctcagcctcccaaagcactgggattatagatgtgagccaccgcgcccggacacatctgctttttcagtgagctcccaggtgatgtagatgatgctgtttcccggaccttaggtgtcagaatcaagggcctagaagtctgcttttcagatgtgtagaatctgggacacgcactttgaatccttagctgcatttttcccagaccccttggtgattgactacccattaggatttgggagcctagaccagggtttgtgaaccctgacgctgttgacctttggggctagatcactctttgatgtcagaattgtcctgtgcatattatgggctgttcagcagcatccctggcctctacccactagatgccagtaacagcaccccccagcggggatcatcaaaagtgtctccaaatgtcccctggaatagaggtggggcagtgttgtccctagttggttaccagcggcctcgcaccctctaatttcaccatgcctgggaccccctaggccagctggtcactcacatcgatgctcaggtcccacagtagcagtcatggccactttagtttggggcaggccccagtggggatacaagctcttggtgcatctcccgtctgctgcactttgacagccactgtcccggcgcctttactgctcagtaaatggtgggtgtggctggactagcaagtggggaaaggataataaacggagcttggtatttgtgttgggagagtgggaatcagaatgaagtcaccataaagtcccttttaataacagtagagaagattctaggcttggtggtattatctcctttggaaattgtcccaaattctctctctattctcccctcctcctacagtccccctgctggtcctgtctgtccttggctcccactggcctaaggcagcagtctctcattatcctgctggctcctgccctacctctcctggtctgtcctctgcactcagccaggtggggcctgtgaacacctgaggtcacggccctcccctgctcagaacctcccatgggatctggagtaccagcatctcactcaagagaaaagtcaaggccaggtgcagtggctcacgcctgtaatcccaacactttgggaggcttaggtgggaggattgctggaacccaggagttcgagaccagcctgggcaacatagaccctgtctctacaaaaaattttataatttttaaaaaattattatcaaaaagagaagcagggtgcagtggctcatgcctgtaatcccagcactttgggaggccgaggcgggtggatcacctgaggtcaggagtttgagaccagcctggccaacatggtgaaaccctgtctctagtaaaaatacagaaatgagccagacatggtggtgggcacctgtaatcctagctactcgggaggctgaggcaggagaatcgcttgaacccaggagacagaggttgtagtgagccgagatcacaccactgcactccagcctgggcgacagagcgggactccatctcaaaaataaataaataagtaatacataaataagaattaaaaagaggaaagtcagtgtcttttgtgtggcccactgggcccccttgatctggccctgtcacctctctgccttgtcctctgcttcctgccccattgctctttgaccctttccctgctcctagaacgcaccaggcacgttcgctctccaggatctctgcgcgggccgtcctccctcccactccacacagtcctctggctgctcctgcgaagcttcccttaggtttctctgctcagaagtcaccctcccagcgaggccttctttacaagcctgacctccaaacaaaaacagattcctctccccttctcatgcaatataagccctgttagagctggggccttgtctgctttcctgtggtttccccagcacggtgcctgccgtgtaggaggtgttggctgtgtgattgaggagggaatgagtgaactgctgcttaagtgcttctttgtgcctggccttgtgcatcctcccacggaaccttcctaactctgtggggcagctcctgttttttgtttgtttgtttgcttttaaagacaagatattgctctgtcacccaggctggagtgcagtagcacagtcatagctcactgcaacatccatttgctgaactcaaaccatcctcccacctcagcctcctgagtagctgagactacaggtgtgcgccatcactcctggctaatttttaaaaaatatttagtagagacggggatctcactgtgttgcccaggctggtcttgaactcctggcctcaagcagtcctcatgtcttggactcccaaagccctgggattacaggcataatctcagtgtaccactgcacccagctatgcagcacctatcttgagctccattttacaaatgaagacatggaggttctgattaagtcactgcccaaggtctccctctgaatagggaaatcctcagaacacacatcaggcctccctgcttaggatgaattcttttttttttttttttttgagatggagtctcgctctgtcacccaggctggagtgcaatggcgtgatctcagctcactgcaacctccgcctcctgggttcaagcgattctcctgcctcagcctccccagtaagtagctgggattgcagacgtgagccaccgtgcctggctaggatgaattctttaactccctacatcattgcactgcttgttgggtggcacagccagaatgagccttggcttcccgtgcactcagtcggggtgctggggcctggctgagccgggccattggagagtagaggatttggggttccctgctgtgcttgttgacgtagacccccccacctgaccttttgtttggccctcatgcatatttagggtttcacctggtggagtgggggaggggaggctccttctctggcgtttcctctgtgaaattctggagtggggtcagctcctgtttctgccctacggccgcatgcctcttctggttgctcaaccaccctggaagaattcccaggtcattttatacccacatcttgatttttgtaactgggtggaccagatcaccagctacctgggggtagggacagaggcatctttttgggtctcttttaggcctggcaaggtggtgggtgttcttgttaaaagatctaaaaacctccattcattcctatgtatctttttggggcctcttgcatgttgggcactaccttgagcctatgggaggaaagcagccagtgagacaggcggggtcgtggggtgaatacctgtggaactttggcggaagccaggtccgatgggatctggagtaccagctttgacttcagagcgctctcttctggctgggcatggagacaaggaatagatacagcaatagccacataactgcaggtggacgatgagtacagctcttgctcagctagtcagcccacagcgagaaccccgccccagtctgggctaacgtgtcctctgctgccagcagcccagtagggttctttgctggagtctggtttttccttgacttgtagctggcaagtgcttacacgctctcagaggcccagcagacatctctgtccactcaaggggcatgtgtgtgtttaattggaccactggtaccaacaacagcagacacgctcagtgccaggccgtattccgagtgctttttaatccccatgatgacttagtggcattggtactgttgttagcctttttttccagatggggaaagtgaggcaaagagaggggaggtaacttgtccactgcctgttaatagtaagtggcaggggccaggcacggtggctcacgcttgtaatcccaacactttgggaggctggggtgggcagattgcttgaggccaggagttcaagaccagcctggccaagatggtgaaaacctgcctctactaaaaatacaaaatcagcagggcgtagtggcacgtgtctgtaatcccagctacttgggaggctgaggcatgagaatcgcttgaacctgggaggcagaggttgctgtgagccgagattgcgccactgcactccagcctgggcaacagagcaagactctgtctcaaaaaagaaagaaagaaagaaagaaagtgcttattggccttttaaaaaaaatagtctcaaagctgggattgaacccaggccatctggcttccaattccatgctcttaagcgctctgtggacgtatcagatggctggacagggccaaaccggctgatctctctggggatgggaggaaggccctgccagcatggaaaggagcagacattcccattcctggtgctctgggaagaactacctccccacatccccagagcaaaggccatggaggaaaacctgaaggcaggaagaaagctatatggctggtcagctgctgtcaccctggaaagccctgggctggcttatgtaccccacctgcatgtgagttcagtgggcccattgtgcagacagcttggcagggaccgtgcagagtcactgttcccgggaatgcagcagctgagctctctgccctggagttccggaggctcctttcactcaagacagccctgtgacggtgatctgttgcacagatgaccctccacctgatgctttggagctggagacagatttctcttgggggcttgctaggaccggggtggggtttggggcatttggagttgggtgtgaggctgtggagccttgcagctgatggcttggagtcacactgcaggcagctgggttcgggccccaccctgcactagctgcatgacctggggcaggtacttcacctccttcctcaggctcttcatttttcaaatacctgcctcgttgactttgggctggagggagggataaaggatgataattcactgaggtcatcttatgcagagtgttcagtccacagacaggcatccacgtggctagaggcagggcctggggaaccaccacttccagctccagggctttaggcaagtggctttagcctccattgggctgcatttcctccttctacagcaagggccagagcagtcccaacctcttaaggctgcggggttcactgagtgagtaggtacctggggagtatttagcacaggccctggcactcaaggtaagtaagccccatggcatgagctgtcatgatcataatgcacaattaagaatgtcagcttgaggcctagcagtcaggcaaggaggaactgcacagataatatgatgaatagggccaggcatggtggctcacgcctgtaatcccagcactttgggaggccgatgcaggtggatcactcgaagtcaggagttcgagaccagcctggccaacacggcgagaccccgtctctattaaaaatacaaaaattttctgcacatggtggcacatgcatgtaatcccagctacatgggaggctgaggcacgagaatcacttgaacctgggaggtggaggttacagtgagctgagattgcgccactgtactccagcctgggcaacaaagtgacactctgtcttaaaaaaaaaaaaaaaaaattatgaatgggatggttctagaaaactccaagttggtcagctactcccctttggccttgaaaagtggtgacatgaggctccatgtggtttttgtgggcctgttttcctcctttcagaggagagtggcctttctggactgaagaacatgagctaaatggggacagcaaggaatctgggagtggaggtcctccagggctttgggaggctccattcaggtcgcctacgtgctggctctgtggtcagttgtgcagggcgagtgtgagtgcgggaagtcagcagacctgggtccctggtgctcccagctgcgtgaccccggcaggatcctcagactcgctgggtcagtgtcaggcacggtgctaagcacagaggtggtacccagtcaccgttggttgttctgaggacagcagaatagtgagggcaatggagggtgggccctatggtcagtcagctggattcaaaccctggctgtgtcaggtctgagttatgagaccttgaataagtgacttagccccctgcccctcagtttcttcatctgtgagatggggatgacacccacttcacatggggctgtggggatcacgagatgatctatatgaagcccttgaaccagctcttggcacagagaaagttctcattgtgcgttggctgtttttattgctattattattattattatttttgagatggagtttcactcttattgcccaggctggagtgcggtggcgcgatctcggctcactgcaacctccgcctcctgggttcaagcgattctcttgcctcagcctcccgagtagctggaattataggtgcacgccaccatgcccagctaattttttgtatttttagtagagacagcgtttcactgtgttggccaggctattattattaaaccatcctagaaagcatcataagtggaaagtgtaaatcgcagatacgttcaggggaacagatccctaacgggggaatctgtggagagctcctcctctggagggcttgttcagagctagcattcgagcctttgtgtttccagaacgtacctgaaaaagtgtgtgaaggaggggccaggagcgtgtcgaccaggtgtgatgttgtcttgccacggggacaggtttcccaaggtcagaggattccaccagattgttcaaggtgccgtatgaataaacacttgaagcattttaatagctgtacttttatttcaatgcatagcaggaaagtaatttcattttattttattatttttttttagagacgggtcttgctctgtcgcctaggctggagagcagtggcacaatcatagctcactgcagccaagaattcctgggctcaagcaatcctcctatttcagccttccaagaagctgggactataggtgtgcaccaccacacctggctaagtttcttatttttattttttatagagatgtgggtctcgctttgttgtccagactggtattgaacttctggcctcaagtgaccctaccaccttggcctcccaaagtgctgggattacaggcgtgagccatcatgcctggccgggaaaagaatttaaacagcatgtcaaacctagtatcccatggctatttctgcattgggtgaggctaaagttggtacttaagccaaaaataaaagtgagtatagttaaagtgtgaagtaagccgtagctcaggtgctctgggatatggtacaagtggcgccagtgtgtggagatctgggagacatggtgctaggagaaaggggtcagggctgggctgtgaagttgtttttcagcggtggaaaggctgaagctccctcaggaggttgctgagctgttcggccccctttgcctctctcctccttggctcttgaaaaccactgaaggtctgagcacagccactctagagtggagcagccgccctggctgctgtagtttcccacatcagaggtggtgggatggatgaggaaatataccaagtgtttatcgctagcgccttctcttcctgcagtgggatgtgagagctgtggaatggccttgagcagctacctgtgatagtggtaataatctttaaccaatgtgagtgagtgccaagcacttcccatgcttgatggcattgaaccctccctctaccatgtgatctttcgatctgtcagttgggacacactgggctgcaggtaacaagacgtctggtgactcctggctgagcagtagagacgccccattgcaaacatcctggaggagacaagctccatggctggtgcagaggtgctcacctggaactccaggcacttatgtttctgtgttcaaccctctgtgtgcaggcgtttcgttcgtgctggtggggttggtcattgtgtggtcatgggatggctgccccagcctgaggatcagatcctcagacacggcatcctgagctaggaggagaggagtaggggaaaggtttcctcttcacgtgcctttccgtttgaaagagaatatgttcttataaatacccctcctcccagcagacctctctttacattccattggccataaaggagccaggggccggccctagctgcaagggaggctggggcagcacatgtctgtaccgtgagagacagcaagagacaggggatggcagtggcatccgctagacaaccaagtgtctgctgtgggtgggtgctattaccacccttgctatagatgagagaaatcaaggatcagagaggtgagagaatggcttgcttggcatctcatacagcgtggagggacagagcagggatctgaagccatgtattcccacagagcctgcagttttaacccctgtgcagtgctaccttcctgagggggacacccagccggccataatgcagcgtggtgagtagatgagctgcaagtgcgggggaacacaggaaagagaaactcggcttgggcaccatcagggagaactgtgaagaggggtggttgggctggccttcgaaaggttagtaggagttctgccagatacacaggaaaatggcctgaggaggtggggcctgggcagagggcacagaatgaacaaaagcgggttgggacagtgtatgctgggtgggttaaggaagcctctttgggttgaaaggtgaatttgtcttatgtcactgggaagtctgtaggaggggagcttcagatgcagcccgagtatggggcccacacgtgccattggggctctccttggcttcgctctgccagcaggctggagtcgggcagatcctcctggtttatcaactcagtggaaagaggatttagagtcttcagtggtttgttttgttccgagacagggtctaggtctgtcacccaggctggggtgaagggcatgatcatagttcactgtaaccttgaactcctggcctcaagcagtcttcccacctcagcctccaaatagctaggagtacaggcatgcaccaccacacctggctgatttttaaatttttgggggatgtgtgtgtgtagagatggggtctcactacattgccagggctggtctcaaactcctggcctcaagtgatcctcctgccttggccaaccaaagtgttgggattataggcgtgagccagcacacccagccagtatttatttacttagagacagggtcttgctctgttacccaggctggagtgtagtggttcaatcagagctcactgcagcctcgacctcctggacacaaatgatccttcctcctcagcctcccgagtatctggatttacaggcgggagcccagcctttattgtttttaattgataagtaaacatcacatatatttatggtatacaacatgctgttttggtatgtgtgtacattgtagaatggctaagtcaagccatttaacataatgcattacctcacttgctttttttgtagtgagaacacttaaagtctactctctcagccattttgaagtatgccatgtattgttagtaattgttgctaccatgatgtacagtagctctcttgaacttatttctcttgtccaactgaagctttgtgtcctttgaccaacatctccacaatcctccactgccatcctctgtattttattttattttatttttttgagacagagtctcactctgttgcctaggctgtagtgcagtggtgccatctcagctcgctacaccctccaccttctgggttcaagcaattctccctgccttaacctcccaagtagctgggattacaggcacccactacgacgcccagctaatttttgtatttttagtagagacggggtttcaccatgttggccaggctggtctcgaactcctgacctcaggtgatccacccgtctcagcctcccaaagtgctgcgattacaggcgtgagccaccgtgcccggccaatcctcagtgtttttatactagccccagggaatattccatttgggttgtatgcctatccaagaaggtggtatttgggagtgggtgggggaagatgaggtagagatgctagatacacaacataatatccacaagtacatgtgcaacttttaatagataccttcgtcttctgtactttagtttccttgtctgaaaagtgggactaatacaatcttccctgcctcatacatagggtttgggaagattccacatggtaggcattcaccagtacagttagagaatgttctttgggccgggcacggtggctcacatctataatcccagcactttgggaggctgaagcaggcggatcacttgaggtcaggagttcgagaccagcctggccaacatggtgacacccgatctctactaaaaatacaaaaattagccaggcgtggtagcatatgcctgtagtctcagctactcgggaggctgaggcacgagaatcacttgaacccaggagatggaggttgcagtgagctgagattgtgccactgcactccagcctgggcaacagagtgagactgtctcattaaaaaaaaaaaaaaaaaaggccgggcacgttggctcatgcctgtaatcccagcacttcgggaggccgaggcaggtggatcacgaggtcaagagatcgagaccatcctggccaacatggtgaaaccccgtctctactaaaaatacaaaaattatctgggcgcagtggtgcgctcctgtagtccagctactccggaggctgaggcgggagaatcgcttgaacctgggaggcagaggttgcagtgagttgagattgtgccacttcactccagcctgacgacagagcgagactccatctcaaaaaaaaaaaaaaaaagaaaagaaaaagagagagagagagtgctctttggaacctagagcactggtctcccaattggtagaaggccccaaatggcaccttgccaggacctggtgttgccatttaaacttgggctgcttggattcaaatcccagccccagctggtaagagctagataaccttgggcaagtagctttacctctctgtgccttagtttccacatctgtaccagagagaagaatgcttagggcactgccaggcacatggtagacatcagtaaatattcttttgatgagtgcatgaatggaaaatctgagtcagaagcgactcacggcttgttaaacctttttggatttgtatcgcctagagtccctccagaaaagcattactctgttactgcaggctgagatgacccatttccctgttcctcagccagccctgtgtcttatcttctaggaaagaattcatagtaattttttccaggagtatgtggtaggacatagtaattttgattggtaatggaaccagcctaatattatggacatgtaagaaaatgtccatgtttttcagagctgcaaaccgaaacgcataaagttgaaatgacatgatatccggcatttgctttaaaatacttcaggccgggtgtggtgccacacatgtgtattcccggcactttgggagaccaaggtgggaggattgcttgagctcaggagttggagatcagcctgcgcaacatagcaagacctcatctctactaaaagtaaaaataaattaattaaccagacatggtgggatatgcctgtggtcctagctactcaggaggctgaggcaggaggatcacttgagcctgggaggttgaggctgcagtgagccaagatcacaccactgtagcagcctggaagacagagtgagaccctgtccaaaagtaaataaatacaataaaatactttggtaagaaggaaaaggggggaaaaggaagaaataaagaatagatgaagctaatatggcagaatcttgacaatttttgaatctaggtttgggtacaagggagttcattgtaccttactccctacttttttttagcatgttaacagaacaaaaaccagccctatctatcacacacacacacacacacacacacacacacacccacacacacacaaagactaaaaattgtgtgaccatgaaaagcactgcgatcctgctgcccacagacagttgggaaggtcctgagccagggtggcgatgggtaaatgaccaccttgcagttcttcgttcatcccctttgtgaggagaccttttctggttcagcaactggacagatagtggatttcaggccaaagcatcaatttctcatctctttcctgctgaggaggaggagaccaaaccccccagtgactgactcctgggatccctttcactgctgggcctggttttaccatggggtggagggagccacaagctgctcttctccagggacctgtgtgatgacggcaaaaacgtaactggccaatcttccacaatgactaaatattaactccagccccgctcctggacgcacatgagcagtcttgcccatccttgttaaacaggcaaccgccccagccttctctctagttgcacatggaagtgagtggtgggctgggttttccagcgctgaacgtgctcttcattccgctgcctgtggacgttagggaggggcttccgcagtccatctggcactgggtgggtctcagtccgggcgggcgatccacccaggaactgacccctggttgctccagaaaggtcatcgtttaagaatgtttcttgggtagcccagtgggagacccacgtgtgcgtgtggtcagctgtagcttccggctgtctcacttctgctgaattccagcaatttctcatttcctttaggaaacaggatgagtctggagaggagtatgaaaaatcatgacaaacctggcgatagggacactgggaacctagccctgaatgaagcttatagttggtcatgattgccagggtcttgaacagtgtggaccaggggaaagaaggtacctggggccagatgccctggattcaaatcccaccacccccactaacacttgtgaccttgagaaagttgcgtaacctctctgtgcctcagtttgctcatttgtaaaatgatgatagtacctgcctcgtaggatttaaggattaaattagatactgttttttaagtgtttgaaactgcctcttctgtagtagttcctcaattaatagtggctatgacagtattatcatatcctgttgtaatgggcatgcacagttaggattaagaacctttggtcagctaggtgtggtggctcacacctgtaatcccagcactttgggaggccgagacgggtggatcacctgaggtcaggagtttgacaccagcctggccaacatggtgaaaccctgtctctactaaaaattaaaaaaattagctgggcgtggtggtgggtgcctataatcccagctactctggaggctgaggcaggagaatcgcttgaacccaggaggcggaggtttcagtgagcctagatcacgctactgcattccagcctgggcaacagagtgcacagagtgagactctgtctcaaaaaaaaaaaaaaaaaaaaaagaacctcggtttataaatagtggttcagatggaagcagaaattagaggagaggaagagggaagcacttttctccccagcagtccatggtttgaggaaataggcttaatttcatcgttgaaaaatgttatttttcactcgatgttcaaaatctcctaggaaagcaggggcaaaagactttttttttttttttcctcctcatgcttggtcatgcaaaagactttaaagagagaaaatgtctcttccccacttctctatatacatgctgggaaaaaaaagactggaaggaaatgaaccaatgtcttaacagtggttgccctttggtggggagagaatgagtaactctataatcttctttgtacatttatgttccaagttttttatatatatatatatgttatatatatatatataacatatatataacatatatataacatatataacatataacacacatataacacatatataacatatataacacacatatatataacacatcaatcatatacacatatatatcacacacatatatcacacatatatcacacatatatatatatcacatatatatcacatatatatatactactttcataaacaggaaaaatgttaaaaagttaaggaatcatgtgagcttggcttctggggaggttgggtggagttacttcagaataaagctctctgcttaatgtttgagtgtccagagacgtttgcaccccacccttccttaaggtgtacttgaggcctattaaatttctacctagaaagttcttgatatcaaagatgatccctcaaactccattcttccgcctgcccagacttgttctagatatttatcttctctcccacctttctcttgagatgaaagaactctaattcttttgtggttcttctgatcttgcaaaagaaccacattttttaaaacttaaaaaaaaaattctgagacagggtcttgccctgttgcccaggctggagtgcagtgggaacaatcatagctcacttcagcctcagcctcttagctcaggtgatcctcttgcctcagcctcccaaatagctatgaccacaggcatgtgccaccatgcctggttaatggtttttattattcgtagagactgggtcttgctatgttgcccaggctggtctcaaattcctgggctcaaagcaatcctgccgccttggcctccccaagtgctgggatcacaggcatgagccaccgtgcctggccctgcagttttttagtacttttttattatgataaaatatgataaaatgtacataacacaaaattaaccatttaaaacttttattgtggcacaatatacataacaaattttttttatattttataattagctttagcttgattgtggtgattttgtcacaatgtatatgtatatacaagttgtccaccttaagtatgaacagtttttatttgtcagttatacctttaaggaaactgtaaaaaagaaaatatgcacaactcatttagtaacctagaagtcaagtgtttaattttctgaaattttattatgcccagttacattactgatagatatagttaccaaaaaaatgtaccttacgtgtgcagttcagtggcattcagtacatgcacatggttgtgcatccatcatcatccatccacagaacatttttcatcttgtaaactgaaactctgtctctgaaaaacaatattctccatccccaagaccccagtccctggaagccacctttctattttctgtctctatgagattgacgaatgtaagtgtctcctatgagtggaatcatccggtatttgtccttttgtggctggcatattttatttagtatcatgtctttaaggttcattcatgttgtatatatcagaatttccttcctttatgaggctaaataatattccaattcatatttaaggctaaataataatgatatgtatatatcacattttgtggccaggtgcggtggctcacacctgtaatcccagcactttgggagtctgaggcgggcggatcacaaggtcaacagattgagaccatcctggccaacatggtgaaaccctgtcggtactaaaaatacaaaaattagctgggagtggtggcgtgcgcctgtaatcccaggaggcaggagaatcgcttgaacctgggaggcggaggttgcagtgagctgagatcacgccactgcactccagcctggtgacagagcgagactccatctcaaaaaaaaaaaaaaaaaaaaaaaaaaatttatatgtatatatatatatctcacattttgcttatctatttatctgttgatggacacttgggatgcttctaccttttggctatagtgaataatgctgctgttaacactggtgtgctggcagggcacagtggctcatgcctgtaatcccagcactttgggagccaagacaggtggatcacttgaagccaggagttcgagaccagcctggccaatgtggtgaaacccgatctctactaaaaatacaaaaaaattagccaggcgtggtggcatgctgctgtagtctcagctactcgggaagctgaggcatgagaatggcttgaacccaggaggtggaggttgcagtgagccgagttcacacactccagcctgggcaacagagtgagattccatctcaaaagataaaataaaaataagactgaaaacaggagagtttattcagtaaacatcaactgaagaccctactctgggccaggcaccaatgagcaaggcaggcacagctcctccctggtggagcccacagccagggagaaaacacaagaaccgcagagccatatggataagtactgtgttctgcgtgctctgaagaagaatgggatttttcaagctgtagtacagggagattcacagaggctccccaaggaagtatagtttaagtgtcattttctgggtgcaaatggaaaacgtgaatttggtgtatgtctctagataagccccacttctgaatgattccggctgtgggcagggatccccagatgggcgttgctatggaagcagcttgcacctctcacttcctgacttgagtttatttccgagtttcccgtgccaccgccagttcccagctgtaaatacagacgtggcagggtccctttttcctgctgcctcgtagctgcccagagaacggatgtggctggaatccagcccaggagcctcctcccgagagagctcgttgtggaacctgccatgtggcggtttctcttccatcccgcctctttcctttgtcctctctcgggactgtgccagcgtgccccagcctgtgttttgaaactttagaccccagcttgtatttggtagagaaatgagctcatgagggcttcctccgccacccagcaaccgggaagttgagtcaaatctctttcatttcagatccatcccccacccccacccccaggccagatttgccacccttctgacagaaactgggttagctgttctctgggactgtttgtgaggaggggacttgttgacctgaacaaaggaactacaaacaagacaggggagggatgtggctgattgctcactgggattgggacttttcagctacccttcagtgctttcgaatagtaattgctaacgtgttgagaatttacagtgtgctagacagtctttaaatcacttttaatccatttaacagctcaatcaagtgtatataattatccccattctagagctggggaggcggtgggcaagttcggcaagttgagtcattggccaaattcctgtactgcagcaatttaggcaaaaagtgggcatttaaccagaggctcctggggcggcccagagacctgaagaaagcctcaggaccagtcagttacttggttgcaagtaacaaaaacaccaactcaaatagacataaattttaggggaaaggattggctcattcaactggaaagcccagaggtggggcagatgtctgggctggctggtccaggagcctggggctattgccagtgacccattttccttctgtctctttattgttccctctgatgtcagtgtcatcctcaaacgtggctcccctgaaagttgcacaccagctgccaggacccgctcaggcttgtgtccttatccctgtcctgaaagaaaaagaaggtatctgtcccgaactatcatgcaaaacctcagagctcctgtctgattggactagcactggtcatgtgatcttccccgaaccaatcactaataagaggggtgagctcacactagcaggctggttgcaaaacctgccatagaggaagggcgggctgggtgctgggattggaaccaggacacacatgccactgtatctgcattctcttcctcacttgttcactccccacctctagatctgcgttattcattctcttatattcagtctgtctttctgctttgtattctactggacaggaagcctggccatcacagactgctgagcaatacacgtttcagtacaggcccccagagagagtcaccgcatgttctctcagcccgagtccaaaacaacccgaggagtggaggatgtctccctccggactaaccggggccgaggaaagggttcttttgacaggctcagctgagtcagatgtcccccacccacccccggccaatcagctacaggcagggatgaagtcattgctccctctgtcccctgccacgtgcctactataacatcttcataggacctctaagctggaatcatttaagcaggatgccaaaggacagcaattgggccacacttcttgactgtagtgacactaaaacctcattgcaactctctacaggaaggccagctcttcagtgtggccccccagaccctgcttgctctggcccctgcctgccacccgcccccactcccgcctcatcctgcagatccctgtgcactgcgctccagctgctgggcctgccttccttgaatgcaccatgtcttcgccttgctcctgggctgctttcttggttctcccaccgtgctgcccactacccctgcccttctggcctggctgatgccgactcctccttcagatgtctccttcaacacactcccagggggttgctccgaagcccaccccgcccttcttccctgagctactcatctgacctgatcagggcttccccctccccttaatgtcagctccataaaggcaggaaccaaatctgttttgttaaaggtatgaccctttccaccaaatatgctccttactaaactttgctaagggaatgaatgaagtgataatagtgacataaggagaaagggaaagcggagcacagtgacttgcctgtcactcagctaggaatcctggcactgtgggaggctgaggtgggcagactgctgcaggccaggagttcgagaccagcctggacaacatgctgaaaccccatctctacaaacaatacaaaaattagctgggcattttagtgtgcacctgtggtcccagctacttgggaggctgaggggggaagattgcttaagcccccgaggttgagctatgatcccaccactgcactgcaagcctgggcgacagagtgagacgctgtctcaaagaaaaataaaagcacccagataaacaggcggtgaatggtggaggaaaaaactgggtgccaagacatcatgtaactagttggggaggtgatgctggggctgagagcatcagtcaaagtttgctggtctaggggagtggtggtggcaggggtgagtccagggtaggggttggggactgtatataaaaagagcctgaggtggggtagagccagtctcgaagaactgaaaggcccgaacctagaagcagcatgagtgaggtggggatggagcagtagaaggtgcaagaagcagacagggccaatcatgcttgaccttgcaggctttgcagggtgtggggcatcacgccttttaccttctagggagtggggcacgttaagagagggaagagggcaagaaaggtaggagggctttgaatattggcatgagaatactctccagggagatgacagtcccccacactgacatgggcagcatctgtagaaacaggaaatgcgtctcagacacatggaaagatacctgactctgggcgtaataagagaaatgccaattaaaatcatgccgagatactacttcgcacctctcagaagggcaagagcacaaggcgtgcgcacatgctgtgggcagtggtgcggggggcatccaggcttctccggagctagtgggagggaaagcagaactgtcgctttggaggggactctggccattcctgtgagtatgaccgggcacacacccacctttcaccccggcagctccacttctaggaagcttcacctacacatgttcccaagtgtgagaagtgatctttgtccaaggttattcattacagcagtgtttgtcagagcagaaaaggggaaatggcttgtgtgtgccttaataaggcactagaggaatcagtcgggtttgtctgtgcagcggaataccatgcggccgggaaggtagagtaaggccctgataagaggggccttccgtgtctgtggtgctgctaagcaggaaaacgaaaagaacgcgatggctcccgcctataaccccagcactttgggagaccaaggcagacggatcatttgaggtcaggagttcaagaccagcccggccaatgtggtgaaaccctgtctctactaaaagtacaaaaattggctgggcacggtggctgacgcctgtaatctcagcactttgggagaccaaggcagacggatcatttgaggtcaggagttcgagaccagcctggccaacatggtgaaaccctgtctctactaaaaatacaaaaattagccaggcgtgatggcacgcacctgtaatcccagctactctggaggctgaggcaggagaatggcgtgaacccgggaggcggaggttgcggtgagccgagatcacgccattgcactccagtgcagtgcaaaagtgaaactctgtctcaaaaaaaaaaaaaaagaaagaaaagaaaaaaacaaatattgtatttgtaattgcccgggggaggggggattttggaaaatgtgaggagaatataggttttgtgaagattccaatgccagtcagccctggagcactcttcattatttattattattattattattattaattcttcttctacctttttttgcttaacttaagcataccctgttagagcactcttaactgtcaaattagatcaccttcattttccataccaggcactgtgttcttggctacatgtgtgtaagtatcttggtgtgtgtgtgcatgtgtgtgcatgtatgatttagttactttattgagatctctgagacaccatctctgagcggccttcctcagcaccctgtctaaaatggccctccctgtcgctgtcttctgctttatttttcttcatggtgtttatcacggtctgatgttctatatttgctttctacaccatcctccttggaatgtgagctccgtgaaggcagggatctttgtctttgttcctttctgtatccccagcgtctagagcagtgcctggcccatagcagttgcttcatgagtgcatgttgaatgaatgtgagtgcgtctgaagactgaatgttatcctcctattgcagatgcggacctcaggcccccagaggccttgccctcttttcatggactctaagaaatgaagaacaaactgcaaagcccactggtgttctgactggggaagaggtgagaaatcaccataggctgcttttttttttttttttttttttttttttgagatggagtcttgctctgtctgccaggctggagtgcagtggtgcaatctcagcttactgcaacctctgcctcccgggttcaagcaattctcctgtctcagcctccctaatagctgggactacaggcacctgccaccatgcccagctaattttttgtatttttagtagagacacggtttcaccatattggtcaggctggtcttgaactcctgacctcaggtgatccacccacctcagcctcccaaagtgctgggattgcagacgtgagccaccgctcctggctaggctaccttttaagctgttaaaattctccctttacccccattccttttcctttcttttttttccccttagagacagaagtacaatgatgggatcatagctcgctgcagccttgaactcctgggcccaagaaatcctcctgcctcagcctcttgagtagctgtgactacaggtgcatgccaccaggcctagctaatttttaaaaattttttggtagagacagggtctccctatgttgcccaggctggtctcgaactcctggcctcaagcaatctccccagctcagcctctcaaagtgctgagattacaggcatgagccaccatgcctggccacattcctttttcaaagccaccttgagagctaggaatactagctgggtctcttctgctgggtcctgcctgtgaagcactgaggagcatgcctgcaccacaaaatttctccagctgtctggggtccatctctccttcttgcttgagcgacccttgttctggcctggtttttttttgttttcgtttgtttggttttgagaggagtcttgctctgtcacccaggctggagtacaatggcatgatctcggctcactgcaacctccgcctcccgggttcaagtgattctcctgcctcagtctcctgagtagctgggattacaggtgcctgccaccatgcccggctaatagagacggggtttcaccacgttggtcaggctggtctcgaactcctgaccttgtgatctacccgccttggcctcccgaagtgctaggattacagggatgagccaccgcgcccagccctattctgggctattattccatggagaataggtagagagagaaggaaatttccagtgtggaggcactctcctctggagggacccctcacttaggctgtgtgcttaatcttatcagagtccaatttgcccaagagacctcctcagacatgaggagtcgaggatgttgtttatttcttcagtatttccgttgtaataacatctttgccagtgtgcttttgagggtccttctgtgccagttacttttccaaccgttcaattgctgttacctcatttaaccctctcaacagccctattgagagtggatattactcctcccaccatgttactgatgaggaggcttgggattctgaatgggctggtaaccagccacacgtccacaggatgctaagccgcagacctgtgatttgattctggctctagctgaccaccaagatggcgctccctggcctcgttgccacactgcttccccatctgctttggggattttcccagtgaccaggaggacagggtctggttttctatgacggcgtgatatggatggttaatcatgtcgcaaagccctgctgtccagcatgaggctttggtgggttggaggaaggtgggtggagagcctgctgcttgtttctcacaggtgtttgccacacaagagatcaaacttctgtttcctgttgagattggtttccatctctctccattcatctctgacactccctatctctcttaattatgtcttatactgacgtctataaccctgctcagccctctccctccagaccccctcccagcagcaactgctgttagtagagctattaagaacacaggcctgtgatctcagcacttgaggaagccgaggcaggaggattgcttgagcccaggagtttgagaccagcctgggcaatataaggagactctgtctctactgaacataaaaattttttaaatgagctgggcatgttggctcacgcttataaccccagccctttaggaggctgaagtgggaggatcactgtagtccaggagtttgaggctatagtaagctaaaatcaagtcactgcactccaaccaaggtgacagagaacctgtctctcaaaattaaaaaaaaaaaaaaagggtctgggcacggtggctcactcttgtaatcccagcactttgggaggctgaggcaggtggatcacctgaggtcaggagttcaagaccagcctggccaacatggcgaaaccctgtctctactaaaaataacaaaattagctgggcgtggtggcaggcacctgtaatcccagcaactcgggaggctgaggcaggagaatcgcttgaacccaggaggtggaggttgcagtgagccgagatcgcaccattgcactccagcccgggcaacaagagcgaaactctgtctaaaaaacaaaacaaaacaaaaaagaatgtacacactctggagtcaggctgcctggatggagcctcacctctactgttacccactgtgtgaccttgagtaagtgactctgagcctcatgttctcccctgtaatataggggtaataataacacaaccttcttccaaggatggttgtgagtattcatcaagattgtgctgaacccagggtacaactcatggcaatgaccaacaaacagggtctctttctatgcacacagaaacgtctctccttacacagtttgtttctttattcactgagaagacatggatgtgcgcagatatatcttattttttcttagagctgctagaacatttatttagcagatactttcttgtgagtggcagcagtcttcaacagtctaggtatccattgtgaacaaggtgagagccctgtacccatagagttcatatattcatcagcaagacataataaagcaatcagtgggtcgggcctagtggctcacacctgtaatgccaacactttgggaggccgaggtgggaggatcgcttgagcccaggagttcaagactagcctgggcaacatggtgaaaccccctctctacaaaaaataacaaaaattaaccaggcatggtgatgtgcgcctgtagtcccagctacttgggaggctaaggtgggggaatcacttgagccccggaggtccaggctgcagtgagccatgattgcaccacttcactccagcccgaacagtggagtgagaccctgtcttgaaaaaagaaaaacagcagtcatgcttactgctctgtaagcaataaaagtagattgaagtaggggccccctgatctgggtggtcagggaagacctccctggggaagcctgccttgagaatagctagagccacacgtgcaaaggccccagggcaagcatgaaattggaaggtcaaggcagccagtgtggcgggagcatttgggtgatgggggaagatgatgaggcccaagatatgttgaagaactttaagctggaaagcagctggaggtgatccctgtttgatgtaatccttctggctgtgggtggagaatagaatgtaggaaggcaaaggtggcctggggaggccagagagggatctcatgaagttgttaggatgaaagatgatggtggtggcttggcctgggagggagaaagaaaggaaatgaattcaggatgtattttggaggtagtggcaacagagtttgctgatggccttgctgtggaggatgagggaaggagggacaggaaggattctcccatgtgtctgcatcattgctggatccctgctgacagacacacaggttgtctcctgtgtctcccaacatgcatgaatgcacatccttgctgggctgtgtctttttttttttttttgagacagggtcttgctctgtcacccaggctggagtgcagtgatgtgatctcggcttgctgcagcctcgaccttcccggctcctggctcaagcaccctcagcctcctggatagctgggaccacaggtgcatgcccccatgtccagctgatattttttttttggtagagatgggggtctcactatgttgcccaggctgatttcgaactcctgacctcaagcgttcctcccacctcagtgtcccaaagccctgggattacaggtgtgagctaccgtgagtcttaagggatgaagggcaagggcatttcaggtggagggaagcatctaagtaaaggctggggccctgttctggtgctgtacagggaacctcccctgctcccagcccagctcaggccagagtgtggggtgaggggcagaactgtctcctgggctgtggaacagcagcatccaacctcaatccactacccgaagcatgtggagttgctgcccattttgagattctttcatgtcctccatcccccgtcttctccagagctgctttctcatctggccaagtccattccccccaccccccatcctctctcctccccaggtgagtccagagtttcagctaatgttgcagcggcagatgcatcacattggatatcctgccattctcgggcccttgctgtctgcatttaggtcagctttgttttcctggggattgaaagcagtggctggtgtggcctttggttctgggccagcctcacaaggaggctggacctgcaggaagtaaacgagaggcctcttgtttgtatgaacttgattcttctaccatctttgtcccctgttcccttctgtgtcttgtttctggccttgttcttgagagtgcaggtcccacaggcagtggccagtgctgcaggcctcctttaccctttctgaggggctttgggcatctgggggactctagtccactcagccagtgagggcagcttggtcagtgtgagtttaaaacagcatgacctctgagctcccgttgcctcctgctccgagtttctctctggcgctgctagcaggtgctgggccaggccacttgtccaaattagcatctctgagagtttgccttctgcctacccaagggctgtagaataggtgtcacagattacaagaaggtaaaagttgacacatttcagctcgtaccaggtccaaaaagcaaagaacgacctgaaggagaaaaatatagaggattaatgagctcaactgagtaccctcccaagttgctggaggacatgtgaatcactgcagcctttttagagcatgggctgaaaaaaaaaagttttatgagccagtacatgcgtgtgataaaacattcaaatggtacaaagaaggtatacaatagtcttcttcccctacttacgatctcccagtcccctcctgtgaggacacccatgtcacacatgttcttccagagatgagatgctcaatacaaaaacaagcatgtattatatgtgcagttctgcaccttcacctggaaaccattccgaaatgtaaccatgtaatttttcataaacagcctttgacccagcactgcaactcctgagaatctaccatgcagaagaaaaaaacaaatagcctgagtagaaaaggatatttattgcagcattgtttgcagtggcaaaacaaaaaaccctggaaataaaacaaatgcccatttttcagggaatgattgaataaaatatggcacatctgtactcttggcctatcagctgctaagaagagtgggtaggagcactgcttgctggcctggaggcatttctgcgatgtatttaagggaaagcaagattcagagaagtaaatttgataagatcctgttgatgtaaaatacagcgacaaaagtcattgtcattttgttggggacagtgggtatctacttcattctcttccacgtcacatggcctgctcagcccggcattctgcctgggagaccttgccaggatccttacttgtggtcagagtaaacttcacccactggtcattattagaggcctgtctgcgagcatcctccacccagccacaggtggagagcccatggcattcgtgctggtaaatgctcacctgggcctctgtcaggctaggagagaccagcctgttcctgggtgccaggtgccatggtgagaatcacttctcactgaccatggcaggcaatctgactgatttcccagtcacttggtgggatgaactaagcggagtttggtgagccgtgaagcgtgcagcaccaccaaatctgccactcatgagaccagcacagaggaattacagaaatgttgaagtcaggacatcagatctcgggctgtgttccagctgaaggttctgggggcagaaagcacaggcaacaacttaattcacgtccaccccaagctcagcacacagagccacccgatggaatgcttctcacaccacattcttttttttttttttttttttttttaaataagagggtcttgctctgttgcctaggctggagtgcagtggtacaatcatagctcacttcagcttcaacctcctgggctcaagcgatcctcccccggctaatttttttttttttttgagacggagccttgctctgtcgcccaggctggagtgcagtggcgcaatctcggctcactgcaagctctgcctcccaggttcacgccattttcctgcctcagcctcccgagtagctgggactacaggtgcctgccaccacgcctggctaattttttgtatttgtagtagagacggggtttcactgtgttagccaggatggtctcgatctcctgacctcatgatccacccacctcggcctcccaaagtgctgggattacaggtgtgagccaccgtgcctggcagcccagctaatttttaaagatttttggttgagatatgatctgactgtgttgcccagtctggtctcaaaactcctggcctcaagtgatccttctgcctcagcctcccaaagtgctgggattacaggtgtgagccaccacgcccagctccatgccagatttaaatgcaagtatcagatcatttcactcattggaatcactaaatgacacagcctgcatttcctggcttatacgtatatatgtcattcattcttaccagaatagtggaaacgctgcacaaaaccaacttaaactgttttcatttcatattttggcatgtgcacattctaccaatattctacttttgacttactgatgacgaagcaatgatagggaaaggaactgtgggttaccgtatctttctcttgccttccatgtcattgttctgcatacctagttggctaattcagggaagtgtggcaagtaaaaaagaatgtggccaggtacggtgactcatgcctgtaattccagcactttgggaggctgaggcgggcagactgcttgaccccaggagtttgagaccagcctgggaaacatggcgaaactctgtcactacaaaatatacaaaaactagccagggatggtggtgtgcacctgtggtcccagctactcaggtagctgtggtgggaggaccacttgagcctgggaggtcaaggttgcagtgagctgtgatcaggtcacagctctccagcctgggtgacagagcaagatcctgttaaaaaaaaaaaaaaaaaaaaaaagaatgtgagaggtctccatggtcttcatgtttctttctgcatttcatgtttcattgccttctttctgctgtgttcgaagcaactcctggctctaatggaggggcctctggggactgtcagtgtccctgcttactcccttgtagttgtgataatatgcttactttatactttttgctttcaatcttgctgaacttgcatgcatcgttggtccgccggaatctgcgctcacaggggatcaggaatactgtatgaggatgccatgactaggagtgacaggcacacacgtggctcggatctcttctgctcacatgcatgctccattggccctggacttcacttacaaaatacaagttcaaagataaaatgatttagaatttcaagatggcaacagagcattagaccaagggaagggctcacagcttctggggtcacacactcataaagctagccccatctgggtttgttgcatgaagtaacaaatactcaattggagatagggttctgttaccaccccagttttaacttacctgacttggagtaatagcgtttcatgctaggacttaaaacacttctaaggccagctctatttttagtggactatatatacgaatcaaaacatagtcagtatccttacctgtgcctgtttttctgccatccactggtgggtagtggtccatattggcagatgacatcatcaactacccatttattcaaaccagaaacatacacacatataggtatacatactgtgaattcacgtcttcttttttgagatggagtctctgtcgctgaggctagagttcagtggcacggtctcggtgcactgcaacctctgcctcccagagtcaagcaattctcctgcctcagcctccccggtaactgggattacgggcacatgccaccacgctcagctaacttttgtatttttagtagagatggggtttcaccatgttggccaggctggtcttgaactcctgacctcaagtgatcctcctgccttgtcctcccaaagtgctgggaatacaggtgtgagccaccacacctggccttaaagtgattatcgatatatttggttaataccggtcatgtttgtaattgttttctgctccttaccagatacttctttttctgcctcctctggcttttttttttttttttttttttttttttgagactgagtctcactctgtcacccaggctggagtgcagtggcgtgatctcagctcactgcagcctccggctcccgggttcaagcaattctcccacctcagcctcctgagtagctgagattacaggggcacacgatcacacctggctaatttttccatttttgatagagacggggtttcaccatgttggccaggctggtcttgaactcctgacctcaggtcatccacctgcctcggcctcccaaagtgctgggattacaggtgtgagccaccttgcccaacttcgtgtctttattgaaaatacaaaaataggcccttcaaagaaatagagcagtgactttgtttattgaattcatgtaacaggcatttgcggaactgttcttgatattgtgtcttactcaatttgaatccagcagaaaatcagtttggaaaaaccgatgagaccctctgaaggtcattcttaaatcttccttttctaccacacacccatggccagtccaccagcaaggcctgtttgttcctgagcctaaacaaatcttcaccagagttctcctttccttccactgtcctcaccctgggccaccaccatatagcaacagctatctcctttttttttttttttttcttttgagacagagtcttgctctgctgcccaggctggaatgtggtggtgtcatcatagcttactgcagtctcgaactcctgggctcgagtgatcctccagccctcagcctcctgagtagctggactacaagcatgtgccacatgcctggctgattttttttatttttattttctgtagagacagggtcttgcagtgttgcccagtctggctttgaattcctgggctaaagcaatcctcccatcttgcctcccaaaatgctgggattacaggcataaaccaccatgcctggcctctctctgcttcttttgaacactgacaatctctgtgaaacagccagagggatctttcaaaactgtaaatcagaacatatcattcccctgcttcccatcacactaaaaagcatgtggctgactgcggccacacagcgcctcgagcaccagctatgtcttgaggcacaccctcccttgctgcagccatccagccacatgggctccctgcgtgtttctttgaacagactcatgtatccttctccatctcctgggattctctgattttttttttttcttagagaatttattaccaatctaatcattcagtctggatagccctttgagtgtcttttttttttttttttttttttttttaggcagagtcttgctctgtcacccaggctggagtgcagtggtatgatctcggctcatggtaacctccgactcccaggttcaagtgattctcatgctgcagcctgcagagtagctgggatcacaagcgcgcaccatcacgcctggcaaatttttgtatttttagtagagacggggtttcaccatgttggccaggctggtctcaaactcctgacctcaggtgatctgcccgcctcggctaggattacaggcgtgagccaccacacccagccacgaatttactttctatctctatgggttcgcccattctggacatttcatgtaaatggaactgtataatccatggtcttttgtgaccggctttcactcaacatcatgttttcatggcccatccatgtcacgcatggattcttgcttcattccttttatggctgaatattccattgtatggaggtaccacattttgttaattcttcagctaatggacattctgggttatccttactcccacttttcacatagcttccttctgctttttctttagttctgggcttaaattcattctggttctcaccactgaacttatatatgtacctgtttgcttacttctttactctggtcccctagtctggacggtacattttgtgagggcaggtacattttgttcaccgtacctagcatcctaccccacacagtgtccagagtgaggtagtgcccattattgaatgaatgactcaacatctcatatatttctcactttacctctccctaaggcaaagtgatcgtaaccccactctgtatctgggaagttctagctttctccctggtgttgaggagagcaaggcatcctaaagcatgaggatactttaaatagtggcaggttactagaaggatttctttggtgtaaaatactgtcccatcactcatctgctatgcaagactaccggctcatttgaaaagcccatttggctgccagtaacagacaccagaaataacagtggtgtaaactcagtggaaggcagtttctgtcctgagtaagacatccagagataggcagtccgtgcctggtgtggcagcttcacagtcatcaagaaaagcagagtgctttgatgcagggtccttctgctcaccatccctagcacagggcctttgtccttaaggtggcttcatggcccagtgtgactgctggagtcaagctagtgagtctggagtccaggtgggaatagggtgagggagaggcacaaaagcatagtccagctttgcgtttctgctgaggaattttcctcaaagtcccacagcttgtatttaccttgcattggccaggctggctgcaagggaggttgggaaatgtagtcttagctgagcatcctgagaaggaagagaagaatggctgctgggtgggcacttagcaactggagttgatacatttcctgcccacagtacccaggtccatcatagccagcttctgcccattggcctggaccttcaagccttaagtgaccagaatcagagcacggactttctgtgtgtgtctggttgaccagagggtgggattttgaggcttgtcaaggagcatcagttcaagaaacctaccatatcaccagctataagaataatggtagctctggccaggtgtggtggctcacacctgtaatctcagcattttgtgaggctgaggcaggaggattccctgaggtcacaagtttgagaccagcctgggccacttagcaagaccatatctgcacaaaacttttttaaaaagcattacccaggtgtggtgatgcacacctgtagtcccagctactcaggaggctgagacgagaggatcaactgagcccaggagttcaagactgcagtgagctatgactgcaccactgcactccaccctgggcaacagagtgagaccccgtctctctctctctatatataaataaatagaataatggtagctcacacttaatgcatacttagtgcataataagtcttgttctaaacaatttttgtggagtaatttttttacttaatcctcacaacacccttactattatccccattttggagatgaggaaactgaggcacagagagggtaagtcaccgtagactttctcactgttagtaattttttttttccgttcattcttccctttcaatgtgttatgaataagaggattacaaaataaagcctgacctattttggtagattgaccactgttctgtcttccatctgattagctggggtctggagagtgctttgtggaaaagcacccaacagtcgaaaccacattgacaggctgttttcataggcgttcaggaaggggcttaactgttggcacatccagcaaatggctggtgacaggaagaaaaaggatccacagctatgcaggatttccgcagcccctgagcctggggccagccgaccacagtgcctgtgtgccagtgggctgggcctggcctttaaaatgacagtcaccctggctgcccttagtagtgtgttaaggagaaagaagctattctctcttcaggtccccaagcattaattcgggcaccaggtcatctttctagctgcctctgatcagccatgctcagtggaaatctttgagtcccacaattcatctctgagttttttttgttttttttttgttttttgagatggagtctcactctgtcgcccaggctggagtgcagtggcactatcttggctcactgcaacctctgcctccaagcaattctcctgtctcagcctcccgagtagctgggactacaggcgtgtgccaccacacccagctaatttttgtatttttagtagagacagggtttcgccatgttggccaggctggtctcaaactcttgacctcaggtgatctgcctgcctcagcctcccaaagtgctgggattacaggcgtgagccaccgtgcccggcttttagctgagtctttctgagaccccttcaggtccatgttggtggctctctgcagactctccagggtggtggcacagcacgtggcccccggctgcagcaggtgtttcagttaggaatgattcagccgcagctagcagaattcacaagagacattgtcacctcaacacataggcggtcctttgtgtcatataacaatgtctggagagagaggctggcaggttcagtggctgacaggtcaacaccagcactgctctgaccctcttgccgccatggccttaagacagctgttggacccagagaactcagcccttctagtctgggcagggtagttctggggacaaggggactctctcaaatccagctatcacatctgcatatctgcattccaagctggagaaaaggcagactggtgaaggggaaaatgactgttagatgagtctgatccttttttttttttttggagacagaatcttgctctgtcacccaggctgcaatgcagtgatgcagtcatggctcactacagccttgatctcctgggctcaagtgatcttcctgcctcagcctcccaagtagctggggctacaggtgcacatctccatgcctgagtaatttttctatttttctttaatagagatggggtcttgctgtgttgcccaggctggtctctaactcctgggctcaagcaatctgcctgccttggcctcccaaagtactgggattacaggcgtgagccactgcaccccgcgtatgaatccagtcctttttgtgaggagaggggaaatgcttctctagaattcctgaatgagaaacctttgccctccccaaggttctgaagatacgcacctgtgctgtcttctagacatgttcatatttttcctttttcatttaggtctttgacccatctgacattgatgtctgtatatggaaggagacagagttcaaggctaagctcatactcttcactgttgcatttagtaggcaccattgttggtggttctagagccagacccgctgggttcaaatccctcctggctgtgccgtctacttgctgtgtgatcttgggcaaggtacctctctgtacttgagttttctggtctgttaaaaatggagatcatagtacaacctacttcacaggttattaagaggtttaaatggattggtagttaaagaacagaaaacagagccgggaatggtggcatgcaccagtagtcccagctactcgggaggctgaggcgggaggatcgcttgagctcaggaggtcgaggctgcagtgagctatgattgtgccactgcactccagcctgggtgacagagtgagaccctatctttaagaagaaaaactgtaatcccagcactttgggaggtcgaggcaggcagatcacgaagtcaggagattgagaccatcctggctaacatggtgaaaccccgtctctactaaaaatacacagacacacacaaaaaaatcgggcgtggtggcaggtgcctctagtcccagctactcgggaggctgaggcaggagaattgcctgaacctgggaggcggagcctgcagtgagccgagatggtgccactgcactccagcctgggtgacagagcgagactccatctcaagaaaaaaataaataaataaaaaagaaaaaacaaaacacaacagaaaacagtgcctggcatgtagtaaaatcacaacgaaaaccttgtgcttcaacccagaaagaatttgcacagccgcacatgggtctgggggctcagcagggagccctgggcctgtcagtaggtgaagtgaagtttgtcactgaggttaccctctcttcatctttacaagaagttgccagatagctctcccaaaatgtttgttcccatttccacccccacccgcagtgactgagtgttccccttactccacaacttcagcacatttggtgttgtcagcctggcatttcggccaatctgctgtgtgtggaatggccacacagcattttcttcccagagcagcttatctgcagaggtctgtctgtgagcccactctaccacggagttacttaggctgggctggaggcaggaccaccgtggggcccccagcacagtgaaatcctcatagctgtgtgttcagagcaccacactagcacgcctatcttctggagagggtgaggcggtggggccgggggtcagggggtacaggaaatgagaaagagaccctcaaagtcagtgacccaaccttagtcgtgtttgtagaccgcatcaatccgcaaaagaaccagcgctaaatcattattgtgtgctattaatagaatataggtcataagaggaaacatgattaattgcaagatgatctcagtggctgttgagggcctagattttcccaaggcaaagtcctttcctcacttatcagcttttctttgttgggatgtaggctagaggcagctgaatgaacagatatttccctaagtcattatttcaaagactggacagggatgggtataatgggaatcttctctaaatgaaggatgattgaaccactttattagtagttgagtaatccctgatgccacagtgatgctctggcggtctagaaaggagagcgaagcttacagcaaaggctgcagtgggtttggttcttccagaccagccacttacacagcggcacagaagagaaaggcctggctgtcccccatcaccactcagtcaagagagagtgcctgtggccaggccctcttagaggctgggtagacactgcccagggtgtttattctgctccaagacagaaacagaagagaacctcctgccgtcttgggacacagagaaaagagctggtaggcctgggcccagcaggctaataatctgcccacttggaagcagatgccagcaacagttgcaatctctggccggttagattggccagcccttcttccttggggagggggaggggggtggacgaggtaaaggggagtgaagaggtatgagcggatgatcctttccatgtgaattgaggtggaaatacgagggtggggtagaaaatcctggcccagaagtacaggtccaggaacaagaaagggcaggtgctccagccagccttgaggtcaggggagaagtgacctggccagcccagcagaaacagctcacctggagccatggtgataatgcctgcttcatagggtttcatgagggttgaaatcaaggtcattaacatgtaagtgttctgaaatgtcatatgaaagactggttttcagtatgttgattatggtcttgtggaacttttgacagacacttccttgtaggcctgttttataaagcaggaaaaaatggagctgccggaggtgagatgagggtgtggggcctggagcctcgcttgcagccttcctttaccctctgcagtctcctcggaggactgtactcaggggagttcaaggtgaaacctcctgggggtctcggggagcccggcactgccccccagctggccctgggccccagataagtcatttatgcattttggaccccagtttgcttttccaccaagtggacagacaagtcagactagatcaaagcattcttcacttagttcctacggacaggggcttcagaattctttgacatctttgagacaggcagtattttgtgctttttttcctggagggacatgacatagttttgtttcgtcagcttcttagaagggtcatgttcgcccaaacatgaaggagtgctgtattgattcctcaggtcccttcctgtgctgttagtttgttgtaagcgacagaacctccccaactcaaattgacttaaactgcaaagggaagttaatggttcagggacctgaaaaatcccagagctggcccagctggagtcagtactcaggtattctcatcaggaatttacccctctttatttccagactctgcctttctcaggtttaacttaattctcggccccttcctcctgccccacctctgctcaccctcaggtggcaaagaagtcctcagcagtccccctgccttaccacccatctgtttccgtcagaaattgcagcaaaatgtccagggcccactctgattggccgtgcttggctcacgtgtctctcccagagccaatccctatggctgaggggaggagacattcaggccaggacgcctttcccccttacattatctcatgggattctgttcttgctgtaaacctgcaggaagtgaagtgctcggcctgtatgtcacctgtgtgatgaatgggtcatggccatgagtgtgctgggattgtggaggcaaactgaaggtcatcgtcccttcccaggtggtagaaagtggggccctgggataagcagggtactggctggattcccggatctgtagccctcctttgctgccgtttccacggccctttggcatcttcctctctcctgcatgagggactgcagggcgacgggcatccgcagctccctctagtcggcaggaagtaggttcctggctgagagagacttggcaccacggcacatcgctgctgatcagcctttatagagccatatgcatcactttagagaaagaaaggagaaaaattagagtggcgggaaagcaatttccgttgcaatttaaaaggcggctattaaaattttataagagctttattgcaggggttttctgatcatcccaggaatttttaaaatgggaagtctagtgataaaggaaaatgttctgggtgcgtctggttccctcctgccctgccaagcatcttgaaaaccaccattgtgagggcttcctagaccagcttagcaatagcaacggcccaagaggccatttctgagtgttttaaaagcgtgtttttctgtatttgctgtttctatgtatagtgactgtttctaattttattttgtactttgctaaatggcctggtagggagctatgggaatcgtcaagaacagcagttgcctctgcccttctgtgttagttgagagtcatttggttgtatgaacaaatagaaattcaggtcaaaaggaagtctaaaaggaagtggatggacacagggcctgggagattcggcttggaatggtttcaggcaaggctggatccagggcctggtgaggttgtcaggacatgtttccttttacctcctggctcagcattcttctgtgctgattttattctcaggtaggctctgaagcagcccctagcagctccactagtagattcaaccaacttagcagctccaagggaaataaaccatctctttcccccatagtcccagtatatatcatggggctggtgtttactggctctgatcatcctggctttggtggcagggtcaccccgggccatctctgaagctgggaacagggaaggtggtgcagtggctttttggccagacttggatcatatgaccagtcccacctccacccacaacccatgggtggggtgagtcccataggactgagtgggaaagatgaggttcaaggggctgactgaggaagagaaatagatgcagggtgggtcaaagcaaccgacgcctggaaccccttcccatactaacttcacgaagctgaatctgcccccacactccccagttgttcttttcccttggaagctgctccgcctttaccttctttcgggtctcgttgaggggttcttaatctcgggtccatggacctttgaaggatggaagattagtgggtcacgaggttggctgggaaaaacattacatctctattttcgctaccctgtaactgaaattaacatttttttatgcacagggcaataaaccacaattggattagcaatatctgtgactttgtcactactagaaatcacggatattctcatatcacattacagtgttgcaaatatcacaaaatatcatttaaacacctacctgtttctaaatcactataggtattggactcaccactagatcttgtaatataacagcattaataggccagaagtggtgtttcacacctgtaatcccagcactttgggaggccaaggtgggcggatcgcttgaggccaggagtttgagaccagcccagacaacgtgacgaaaccccatctctactaaaaatacaaaaattacctggggtggtggtgtgtacctgtaaacccagctactcgggaggctgaggcagaattgcttgagtctgggaggcagaggttgcagtgagccaagatggcgccactgtactccagcctgggcagtagatcaagactccatctcaaaaaaaaagaaattattctgaggagtctgcaactaattcaccaggttgccagtaggagtccctggcatgagaaaggttaagaacccccttgggcttctccaggaaccccaggggaatgatcattgaagttgtcctgattcctggaccctggggtgttagctagctgcttgctaggcttccttcctgggagattcctggaggagctgaccggcctttgaggttggcggggatatttgggtagcatttggacattatggtattggggaagtggagcagggaggtgttgccagcccactgccttcattgaccattgtgacagagtgtggtctagccaggtggtcagaaacagactctgggaccaggttgctgggttcacatcctggctgtatatagtacactttttttttttttttaaacagggtcttgctatgttgcccaggctggtcttgaacttctgagctcaaatgatcctcccatcttagcctcctgagtagctgggactataggcttagtgggactatagaccactgtgcctagcttagtatacttttgactgactgggcaacctcagctagtgggtcccttatgaattctgtgcctcagtttcctcatctgtaacatgaaagtaataatagtatcttcttcttgggtgatcgggagagtgaaatgagtcagcacttgtctgctaggacagagccggcacattgggagggattgttattagtgaatggccattgcatataggacagctctagaccctctcagctctcatctcctgacttagtgcccagcctctgccggtgcccagaatgtgatgctgaacaatacagacagtgccttctccgcctggagacattcattcatccatggaatattcacttaaatataaacaagcatactaaatattcaaaggcataaattaataatataaagttccaaaccaggacaagtatgatttctctgtcattcctctgctcacagttgtctgaggaaatgtccttagaatagcccttcatctgtcccccctgccaccgcttgcccctcactcaccccgtgccagctccatgggcctcctgactgctcctgagatgctccacatctgctcctgccctctggaaggctctttcccaggtagtcacatgatctgtggtctcatgtattcacatctctgtcccctcgtccgggaggccttccccgagctctccgtttaaggtcacagtcccatcactatggcgtcaccccgctaggtttcatcaaggttccactctgtgactttgtattgtgtatttgtttattgtcctcctcccctactagaatgtctgctctctgaggacagctactttgtcttggagaaccctggttgtattcccggagcctggcacatagcaggtgttcagtaaatacttttttttttttttttttgagacagagtcttgctccatcacccaggctggagtgcagtggcacaatcttggctcattgcaacctccacctcccgggttcaagtgattctcctgcctcagcctcccaagtacctggcatgacaggcgcccaccaccacgcccggctaattttttgtatttttagtagagatggggttttgccatgttggccaggctggtcttgaactcctggcctcaagtgatccgcctgccttggcctcccatagtgctgggattacactcagccatgttcagtaaatacttgttgaaagagtgaatatgtgactgacagctgggtattactgcaggaaggcttaagttggccagagacctaacctcttctttttcctccatgtagatgcacagtctctgacatcagctctcctgggaccctccaagagcactagtgtctagaaggcactaagggtgagtaaggcgtggctgctggtttgcttagaattttacaactcatacacatattattttttttaaaattttaaaaaaagagtatcaagggaaaaatgaaagtttgcatcgctgtacttctgtcacccgcaagcctaacgtctaccccagaggtaattactgtcagtcactggctgggtgccctgccagaccttttcccatacacaaacattcctacatgcacatatacacacttattttggttcgttgtgtgagaaaaaggaaccaggctatgcagtgcttcttggcttgcttccaccatccccaataatagtatgttttgaagatctttgctcatgagcatacctcagcatatcatacatttcatatacttttattttttctttactttttaattcaatttttaaactttacatagagtaaaaccctcttttggtatatagttctttgttttgttttgagatggagtttcacttttgttgcccaggctggagtgcagtggcgtgatcttggctcaccgcaacctccgcctcccgggttcaagcgattctcctgcttcagcctccggagtagctgggattactaggcatgcgccaccatgactggctaattttgtatttttagtagaggtggggtttctccatgttggtcaggctggtttcgaactcccgacctcaggtgaactgcccacctcggcctcttttttttttttttttgagatggagtctcactctgtcacccaggctggagtgcagtggcgccatctcagctcactgcaacctccacctcccaggttcaagtgattctccggcctcagcctcccgaatagctgggattacaggcccctgacatcatgcccggctgatttttgtatttttgtagagatgaggtttcaccatgctggccaggctggtcttgaactcctgacctcaggtgatccatccgcctcagcctcccaaaatgctgggattacaggcatgaaccaccgcacctggccggtatacagttctttgaatggagacagatgtagacagttgtgaaactgccaccacgatcaagattcagagcagccccaccgccccactatgtgaatgtactggtttctctgttggttaaaaatatgagccaggtgtggtggctcacacctgtgatcccagcactttgagaggctgaggctcgaggatcgattgagcccaggtgctggagaccagcctgggcaacaaagtgagaccctgtctctacaaaaaatacaaaaattagctgggcgtggtgatgcacacttgtagttccagctacactggggctaaagtggagggtcacctgaaccggtggaggtcaaggctgctgtgagaccctgtctcaaaaaaacctaaaaatttaaataaataaataaatacatacatacatacacatgtatggcatgggtaatgggtatttacacatattttatatatatatatgtggcaaatatatatatatatatatatatatatatggcaaatacttacctgtgctatataggttttgaatatgttatgtttaggtttctgggttgggtttgggttggtttgctagtgaacattctctcttgtttctgtgggtgggttctaagcagtggcatgggcccccagctgcatgtcatttcagtttgcagtgacgccttcctggacgattcccagctttgttgggaggggccattgtctgatccttgaagaaccaagagaccataacggtgtgggaggtggaagggggaggattgtggcattcagaccctggatgcaggtagccgtgtcggccaagctgcgggaactgagtggctgtggatggagtttctctctcctggatgtttagtgggtctcatcacattccctcatcctggcagtcttgcctgggtacctgaagcttgtgtgtgggacagttgctaggggccagatttctgtcaaaggatgcttcctggcacaattcttgattacttttattttgaagtgattttagagttataaaaaagttgtgaaaatggttacaaagttcacatgtctaccctacatccagcttcccccatgttaccatcttatacaaccttaacacagtgatcaaaacaggaaattcacacaacccagtacgattaactcaatgacagacattaatcacatttcaccagtttttctgcggatgtccttttttcttccaagagtctattcttgatcccacattgcatttggttttcttgtctccttaacctcctccgatctggaacaattcctccgtctttcctagcctttcatgacccagacactttggaagaggactgctctgctattttgttgggtgtttcaacttgggtttttctgatgttttctcatgacctgattgaggttattcattatttggaacagtgccacacaggcagcatgcccttctcagtgcgtcattgtgggggtctgtgacatcaatgcatcatatttccggtaatgttcacctagatcacttggttaagttgctgtgtgccagatttctccacagtaaagttacacttttccctttgtaattaatggctatcttggggcactccaggccaggagtttgaaaccagcttgtgcaatgaagtgagaccctagctctaaaaaaataaaatagaaacaaattagccaggtgtggtggtgcacacctgtagtcccagctactcaggaggttgaggcaggaggatcgcttgagcccaggatgcggagattgcagtgagctgagatcgtgccactgcactccagtgtgggtgacagagcaagagcctgtctctttaaaacaaaacaaaaatgctacctttggggagaaactttgaggctatgctaatatcccacatcccgcttttcctcaaacttccacccactaattttaccatccattggtggccgggtcttgtctacagcagttactgctgtgctgtttccctgatggcagtttttgtgtgcctctcattccatctacatttattaattggaactcttctgtaaggaagacctgtcccttcccccttatttctttatttagttactaatttatatcctatgggctcatagatacttgttttaatctagcacattcctttttcatgtgataaaagctcccaagttccaagtaaattcctagcattgcctctcacacagcaggaagaacggcacttttcctacgtggtaaccagggccttagggaacttggaaagaacatgaacaggtttcgtttgttcattcatttattttccttcactcagcaaatatgcatttgagcacctactatctgcttctaggcactagggattcaggaatgaaaaaacaaactccttaccttaagggaacggacatcctactggagaataaaacagtaaacagataaaaagtgaatatagggctgggcatggtggctcacacctgtaatcccaacacctttgggaggccaaggtgggcgggtcacttgcggtcaggagttcaagaccagcctggccaacatggtggccgtctctactaaaccccgtctctactaaaaatacaaaaaaattagccaaccgtggtggcacacacctgtaatcctagctacttgagaggctgaggtgggaggatcgcttgaacccagaggcagaggtggcagtgagctgaggttgcgccactgcactccagcctgggcaacagagcgagactcggtctcaaaaaaaaaaaagaagtgaatataggataagttggatgtatatagtgtacataggatgtatataggagtatatagtgatgaataaagcagggaaggggactggcctcacagggcaattttcggacaaggtggccaaggaaggcctctctgaggaggccctgaatagaggagggagtgaggcggtccccagcctaattcatccacagccatccgggagatcacagtcaaatcatctcccttctgaacacagtttctgtgaaaaggaaatgtgttccctctccaaggggcagccctgctcagctggagccagtcttatccctgagtattgccagatctgatgttccccgcaatagaaaaggaaagtgaaaaattttttgccagtccattgaacccaaattatgcaacgtcagataatgaatgactgtgactatgttttgttttcattgtgtttattttttaagtttgcttttctttgtagcaaaagatagcaatttttcatttttagtggtgatatggattctttttaaatatataaagcttgaacatcacttgagggctgggtgcagtggctcactctataatcccagctctttgggaggtcaaggcaggagaatcacttgaggccaagagtttaagaccagcctgggcagcagagtgagactccatctctacaaaaaatgttttaaatagccaggcttggtggcatgcacctgtagtcccaggaactcggacggctatggcaggaggatcacttgcgcccaggaggtcgaggccatgctactgtactccagccccgggcaatagagcgagagagatacgtatgtgtgtgtgtgtgtgtgtgtgtgtgcgtgtatgtaaataattgtacagatggggagtagatacagctgaaaaggaagggtggaacacagcgactgggcttggtaagcactgtatggctcagccacccactgtttttcctctgggtcaggggttctcagcagcgggcctgagctgaaattggcaaacaattaccatgggtgtgcgccttgagccatttgcatcatggtatgtgcattcggccaggaatgtcttcaagtttcaggaacagaaacccccgctcactgcagcttgattgaatgagggcttatttctcgctcacaacagcacacctggaggtgcttggctgccagtgttagtttggtggctgggcagtgtcagggcagagccgctttgattctcttgatctttcccctcatggacacatcgctcctgctgccatgtcgcatagcctcccctagctccaaggaaggtggcaaatgttatttaacttttcagcctttcctgaggaggaagccagagaaaaaatgaattgagagtatctgttggggtggccagccagcactgcctggtttcatggggaaggaaaagcagtaataatgaacattaatgggtgctgactctgtgccaagccctgccgtaagcgcctcacgtgcatgatctcattcagttcttgtaactaccctaagacgtcactgctgtgatatccccatggtaatgatgaggaaactgaggcacgagtggtgaagctgcctgccaggtagaggagctgggacagggaggcatgcagcctgggtccagggcccctgttcttagccactacactttgttgcctcataagaggtccgggggtgcggggggtggggtacaggggaccaggctgctcactgtctggcctgggtttaaattcttccagcaagggcagagcccagcagtgtgttttgctttggggaagttgtgatcattaaaaaactgtcttgtgaatcacatccgcccctgtgtaactaactacctcccactggttcaggtctagtcctcgggagagcaccagctgcacgtcttattcctggcagccctgcagggacttacaagtggctgagggaacccctcttggcctccctttttccaaactatacctgtgcttttagttattcttcccaggatgagccttctagccttttctttctctggaggtctgctggttgattgcgcacacatttgatatgcgcctcccctgcccgtccctgtagagtagtggggatgcagtggtgactggaccagcctcatggctgggtggctctgccctcatgcggctccccatccggtgagggaagcagaccttcagaccccagagtggtcaggtctgtgatcggggaagcccaggggagtgggaacccagtggaggtgcctaacccagcctaggggtcaaagagggctcctggaagcagcttttgggctttggaggtggaatagagattcatcaaggagccgtttctaccatcttctccacctgcctttcttcagtgaaactctcacgacagctctcctttctgaacttctgtttccctcctcagtaaaatgaaagattcagacttgggtctccatccatccttccaaccaaccatcattgattgggcacctcccatgttcctgctcctcttgctgggcacgaggcttaccctggtatacagtatgttgggaagttctgcaggtaaacaacccagagtgataagagttctaataggggaagccacggggctgtgggaaccccaagaaggcacctaacggtgacttggagtttggggacaggcttctccagggagatgaaagcaaaaatgggttgacacggtggccaagagcacagctttccggaatccagctgacctggggtctagtcatagctgagcccgtgactagccctaaatgggcagcttaactgtgggtgcttccattttctcccaaggtggttgtaaggattaagatgggattatgaatttcaagtacctaggacagtacctggcacgagaagtcgcataatagatgataatgagatgatgatgatgagatgatggtggtggcggtggtggaggtggtgatgatgataatgaggaggaggaggatggtggcagcttgcattcattagcccttactgcatgttggaggttaggtggcttagtaacagcctataagataataagcgtgagctgctgctgttgtgattattcattcaccagacatgtgaggggtcgccctgcacccagccctgagctggcacaggcctaggtgtagcaggactgtgttctgggagcagagttcatacagcgaaagcctgggccaggaatttcatgggccaagttgggagtttctttggtgtgtgttggagacccatggctcctggcctcctggtcccctttcttgttcattcctgagacttttcagcactggcctcaagagtgtaggctgcccttgacctctgtggccagaacgcatggatgctctgctcagcccatcagccaagccccaaattagacctgacagtgtgatttattctctgggatggagccgggagggcacagccccagtgggtgattcggagggaaggttgtcagcccgaattagcccagacctttcatgcagccttgctggttcagcttcctctggctaagagggttttccagggtgttgctggcttcagcactgcctccttccccgtccccagggacggacacttggctgtgatccctaaggagcgtgtgtcccgagggctgcccaggcaggccctgtctgaaggcagtggaggctttgggtcatttcatctgccccctcaggagcacagagtcgcagctccgtggagtgcttggcccattccccgcttctgttctttcactgagttccgtgctgggtggctggtggccgtttccctgctccacaccttccggtcggtgatcacagtgtctctgctttctagctgccttcattcattcacaggaatgcctctgatgggcgagtttctgctgcagtaacaaattaaccctgaaatcctagaggttggacacaacagatgtccatttcttacttgtgacatgggcaggtcaggtgggagggcttaaccttgtacctcagggacccaggctgacaggagctccccccactcgccccatcccggcctgcccctgtcttggagcctcacaggctgcagagacaccacagcagaaggggacggagaggtgcacagcagcacttagatgccgaggcccagaagccacgtgttcacttccacctgcacccagaactgtcacacggtcctgcctaactacaagggactagaaatacgatactcagtgagcagtaactctcatagccacagtggactggtggggtatttatgcagcacctactgtgtgccaggccttctcagggctctagaaatgcagaggtgtccccctgccttcctggagctcatagtttagtggtggaaacagaattgaagtaattacagcaacagctgtgtgattatgtctgcactaagtgctctggcagaggagcccagagggccgtgacagcatatctgagagcccggacatgtcttgagaggtcagggaacgtctgtcataaggactgacgtttgggaggaggcctgaaggataagtagaccttcccccagtgggggcgaggaatggggagagagtccctggtagagggaaccgcatcagcagagctccggacgtgggaaggagcttgactctgcgaaggaactggaagaagacctgtgtaactgcagggtcaagagctgggagaggtaggtgggggcagatggtgccgggtctggctggcggtgaggaggaggctgggacttggaacacctgccttttggagctgttgaaagaatcaaatgagctcagtcattctcttaacaaatgctgagttcccactctttggcagggggtgttccagcagtgaacaagacgacaaatatccctgttctcagagctggcattcgaggagcgggacacaggcagtgaaccaggcagatacataggataatttttacctggtgaaaaaaactgctgaccagtaaatagagtaaaacaataaggagcgtatggattggaggcttttggctccaggtaacggcaacccccattcatgcagacttaagcagtcaggccccccacctccaagtctgagggttctttggaccctgtgagctggtgacacagcagctcaacaatagcctgggggactgtctgtcacggtgccttcatcttaaagcaggcaccttccatggtcagaggatggcaggtagggatgccctgggcagtgtcagggcaggtagcgggagatttttcaaactctgcatgtcccaaggatctgccactagcgtgccttggtgacagtgaattatagaagccagtgtgagagtaaggaggaagctgttgctctagtctaggctggagatgccagaggatggggccagggtaaggagcatggagggagaggagggggcaggttctgggtacggtttggaggtagagtggacaggacttgctaatggcatggctgctggaaaggagttctgagcagacacacacagatgtccactgtgcactgtatcttcctcatgtaaaagtcatgtgcaggccagacgaggtggctcattcctgtaatcccagcactttgggaggcccaggtgagcagatcacctgtcaggagttcgagaccagcctggccagcatggtgaaaccccatctctactaaaaatacaaaaattagccaggcatggtggtgggcgcctgtaatcccagctgctcaggaggctgaggcagggagaattgcttgaactcaggaggcagaggttgcagtgagccaagatcacgtcactgcactgtagcctgggtgacagcgagactccgtctcaaaaaaaaaaaaaaaaaagtcatgtgcatgttacagtctgagaaatcctacaggaaagaaacccgcttctttgactatggagcacttttctttttgaaagacacccaggaacatcttctacagtgtaatttggaaaatgtttaataatgattcccatccttgctgtacattagaattatgttggcaactttaagaaatcccaaggcctgggtctcacccttgaccaattcagttagagttactgagcgacattataaagctgtattatttgtttgcatttctttaattttttaattttaatttttattttttggagacacagtctcactttgtcgcccaggctggagtgcagtggcacaatcttggctcaccacaacctccgcctccgaggttcaagcaattcttatacctcagcctcctgagtagctggaccacaggcgtgcaccaccacgcctggctaattttttgtattttagtagagacaagctttcaccatgttgcccagggtggtctcgaactcctgagctcagacaatccacctgccttggcctcccaaagtgctaggattacaggcatgagccaccttgcctagcctgcatttctgattatcaaagtaatgcttgtttgttgtttaaaaaaagaaatcaaaggacccataatgccccaagataatcacttttatgagctggtgtgtgtcttccagatttttttcaacacttgtacctaaaaaatgccatacgtgccccaaaacaaagtggttcgatagctttccaaagagatgaaaaaaagtttgccagcggggggtgggggtggtgggggtgggggtcgggcatggtggctcacgcctgtaatcccagcaatttgggaggctgaggcgggtgaatcacttgaggccagaagttcgagaccagcctggccagcatggtgaaaccccatctctactaaaaatacaaaaattagcctgacgtggtggcacgcgcatgtaatcccagctactcaggaggctgaggcaggagaattgcttgaaccggggaggcagaggttgcagtgagccaagattgcaccactctactccagcctgggcaacagagcaagactctgtctcaaaaaaaaaaaaaaaaaaaaaaagtttggaggcccacctgaaacattcagggatttgaacaacataatcagctgcctttctgtatttcctaattgattaattttgtgacatgtttggaatccagatatcaaaaatgttgaattcagcagggtacagtggctcacgcctgtaatcctgtccctttgggaagcataggaggatcgcctgaggccaggagtttgagaccagccagggcaacatagcaagaccgcatctctacaaagaaaaaaaatagccaagtgtggtggtgtgtgcctgtggtcgcagctacttgggaggctgaggtgggaggatcgcttgagcctaggaggtagaggctgcagtgagtcataattgtaacactgcactgcagcctgggtagcagagggagaccctgtctcaaggaaaaaagagaaaattggactcaaaatgttccgtatatcctctcacatgtcataaaacagtgttagtcacacttttcacagacatccttattacaagagtcactttttgagtcatctacacgtatttccagagtacgctgtctccacgtccatctgaagcatttgtgatgtggcaccccttgaatttgtgtatgttgtcactggaaactgtatcccaacactcaggaagccattcctctaccattagacagtttttttttttaatgccccttttaggaattggtgatctctacagccactcactgttaggtttttttaaaaaaccaactcagatgtttaaggacagttactgaacatgggtaagtggctgagtaaacgtgaacatataaaagtggttatataatcgcctgtttgtgagtcaatcagactcatcattccagtgcgaataataaatgacaacttaggaaaatttctccatgttctttcttcccccacagtggcactttgctttgagacagttttcagtgctatattacacatcctttttttaaaaaaaattcaaaattctagttgaaatgccccatttaagagtttcaactgaagtattttgtttaaattggttaaacgtgtcttaaaatcatttgtccctatcttgctttttttgagtcggagtctcgctcagtcgcccaggctggagtgcagtggctcaatctccgctcactgcaagctccgcctcctgggttcacgccattctcctgtctcagcctcccaagtagctgggactacaggcgcccaccaccacgcccagctaatttttttgaatttttttagtagagacggggtttcaccgtgttagccaggatggtctcgatctcctgacctcatgatctgcccacctctgcctcccaaagtgctaggattacaggcgtgagccaccgtgtccggcccctatcgtgctttttaaaggaacctttatttattttattattattactttttttttttttttgagttggagtctcactctgtcacccaggctagactgcagtagctcgattttgtctcattgcaacctccatctccaaagttcaagcaattctcctgcctcagcctcctcagtagctgggattacaggcacccgccaacacgctcagctaattttttttttttttttttttttggagatggagtctcactctgtcacctaggctggagtgctatgtcatgatctgagctcactgcaacctccgcctcccgggttcaagcgattctcctgcctcagcctccagagtagctgggattacaggcgcacgctaccatgcccagctaatttttgtatttttagtagagatgtggtttcaccatgtcggccaggctgatctcaaactcctgacctcgtgatccgcctgcctcagcctcccaaagtgctgggattacaggcgtgagccaccgcaccaggccccagctaatttttgtatttttgttttgttttgtttttagtagagacggggttttgctatgttgaccaggctaccaggctggtctcgaactcctaacctcaagtgatccacctgcctcagcctcccaagtagctgagactacagccacaagccatcacggccagctaagttttaaattttttatagagacaggtctcactatgttgcccaggctggtctcaaactctagtctcaagtgatcctcctgtctcagcctcccaaagtgctgggattacaggtgtaagccaccacacctggccctttgctaatttcttacttggttatttttttctaatattgagttgtaagagttctccataaattttgaatattaatcctttgtcagatatgtggtttgcaaatattgtttcccagtccataggttgactttttgttatgtcgattgtttcctttgctgtgcagaagctttttagttcgatgtagtcccgtttatttatttttgcttttgtagcctgagcttttggtgtgatgtctaaaaaatcattgccaaagccaatgttgaggagctttccgccatgttcttttctgggagttttatggtttcaaatcttacatttaggtcttttatcctctttgagtttatttttgtgtatggtataagatttcattctttgaaaggctcagtttcattcttatttcccacttatgtttggatttatttctgggctattttattctgtttttatgtcagcaccatactgttctgattactatagctttgtaatataattttaaatcaggaagtgtgatgcctccaactttttatttcgcagtgttgctttggctagttggggtttttttgtggctatatataaattttaagattgcttaaagagcatgtttacagtgacttatcacacttggaattgtgaatacttgggaatacttaacaagtctcctatagtatatgcctccctttttattattgcccaaactagcatcatttaagtttttaaaagctaatatgtctttcccaaagagcacttgttccaaaataaaataaagtgaaagaccctgaaatatagctacattttctaaggataatattttgggcatatcttgctttatctttggttacatcttttatccaaaataaatgaagttaaccactcacaaatagctagctcagtagtgtttgaccttcctgcgtgagctgtaactagttctctcacatccccagcttgacctcattcattcattcattcgacattgatatatttcctgtcagctaccctgaaagccagtagtaaagatggcctttggaatgtgttggaatctcagccatccccttctacctctatgaccatggccaaagcacttaccttcctgtgcctcagtttctccatctgtaaaacagaagagataatgctgcctacatcataatatggttgtgggcattcaaggatttaaaacagatccatgggccaggcacggtggctcacacctgtaatcccagcagtttggggggccgaggcgggcagatcacttgaggtcaggagttcgagaccagcctggccaacatggtgaaaccccatctctactaaaaatacaaaaattagccaggcatggtggtgcatacctgtaatcccagctactggggaggctgaggcaggagaatcgcttgaacctgggaggcggaggttgcagtgagctgagatcacaccactgcactccagcctgggcgacagagcgagacttcatctcaaaataaataaatagttagatggaaagaaagagaaagaaagaaatagagaaaaagcgagagaaagaaagaaaaaagcagatccacagtcccaggtggaatgtgatccaagctgatgtcttgttatcactgcagaaatatcgatgtgatagtctaccactgttcgctcagaaccttctagggttgcctttctaaaatctgaattattcagaattccgaaacacatcaggcccaagaggtttaggaagggatcatgccaccgtatatatgaagaaagcacttagcctagtacctggcacatagtaaatgctgtgtcaatgttaaccatttactgttgctactattactagttaaagtgcttacctcaccatccgtaatcatcatcatggaaaagcgagtgataatcacagtgagataccgtgacacacctgcttcagtggctacgataaaaagagggcacggaggagctgaggtcagagagttccacaggaggtctgctagggactggggccttttccttacatggatagggggagggttctgagcagaggaaggacatgatctgacccatagattaatagagtccctctggctgtgtgtggcagcaggagccagagccaggaaattggggcagaagctcctgctgtggtccatggtcctgcctgtgggggtgtgaaggaggggtgagcccatttatatcttgaaggtggagctgacagtgagtactgatggcctggatgtaggggtgagagaaagagagggggctaggatgaccctgaggtttgggcctggacaccagctgaggggtgaagatactgcattgagggaccccagggtcggggtttgcagggagtggcagaaggccttgtgaagaatcagagacgtggctgagtctgttcggtgctgggtgcccgtcagacagctgcgtgagatggcaaggagacagttggatacgcatacctgaagttgagagaggtccaggggggagaaggaaaagtaggggtccccagcacagaggtgttgaaatcacgaggagagccgtgtggatggggaagagcgaagctgtgcggagagacggcgaggaatcagcgaaggaggctggggagggagtgccagtgaggagggaggagacctggagagtatggacccctgcagtgaggcaggaggttgatgagggcccgaggtgattgctagatgggaggcacaaaaggctgaagggagcaggttcaagagagacggggctttgttgaggcctgtgaaggtgtgactacacgtgttgtttgttgctttctctctgttcaggccacacctggcacacaatagctgcacaataaaaatgtgttaaattaatgtcttcatggattggggagaggttagaacgcagaggagcccttggaattgggggtcgtcactgtggagtatggcagaagtgtgttctatggacctgggctcctgtccccagatgatgatggggaaggagaatcagaaacataacccagacatctgggcgccccccagaccatttacttagtgcctggtgccaccaacaggactgacgtggcatccccatctagagaatgagtctaataataatactgactcatggagctgttgtcaggaatcaatgagataatgctgtaaaacatcatcagtgtttgataggcttgagctgttgttacaagttaaatcctatcattaccattattctggcttcatggccctcaccacctagtgggggagatagatatcaaataatcaggctgggcgcagtggctcacacctgtaatcccagcacttcgggaagccaagatgggcagatcacttgaggtcaggagttcgagaccagcctggccaacatggtgaaaccccgtctctacaaaaaatacaaaaagtagccagtgtggtgatgcgtgcctgtaatcccagctactcgggaggctgaggcacaagaatcacttgaacccgggaggcggaaggttgcagtgagctgagatcatgccactgcactccagcctgggtgacagagtgagactctgtctcaaaaaaaaaaaaagataccaaataatcactcagccacgtaatttaactgtggcaatgaaactataaagaaaaggtacacagccactcgagaggctaaggtgggaggatcgcttgagcccggggggtcgaggctgcagtgagccatgatcacgccactgcactccagcctgggtgacagagcaagaccttgtctcaggaaaaaaagaaagaaaaagtgcagggggccttgagagagaataacaggcaggaaggaggtgggggtcttattccaggctggggtgggcgtgggagtgtcagaggaggcttttctgaagaagcaacctgtgaagctcgacggggaggatgaacaggaactagcctggggtgggctggaggctggggcattttggctgggagaatagtctgtgtgcaggtccaaggtgtcgcaggtggggaggaactgggtgtgttggaggagcagagtgcgggaaggaaaacttgggtcagctggtctggtgagccacggtaggagatttggactttcttcccacagcccctgggagccacagaagggttttcaggggagaagtgatacaacttcatttaattctttctaaacttctgtgtgcactttcaagccttgatgtcctgacactcttcctcccccaggacagtttgtaccgctccagggtcacgtcagagactccagagccgcctccaccactgtgattccttgaagctttttgccgtcatctggccactcagtcggcggggttgagaggagctttctatagacgagaaggtgccctggttctcgactcatcagcctctaggaaagaagcagcttgctggtccatcccaggctgctgggaggcccgagaaacaggtcacagcagccccgcctcctccatagacctccaggcctctcaaaagggacccccacctgctgcccgcaaagatggcctcatttcctctcaggcccagcgctgccagcagcctgtcccccctcctcatttccctatttcttttgagtggccagatgacagcacaaagcttcaaggtcgggggccgtggggtggtggtggagtctttgacctcatgccgatcaacgtgcttctctcggttccctgttctgggccctgccctggaaagaggcagggtggccggggaggggagtttccagattacctgtgtctcctgggcatggcacaggaaatgactccttcataggctgagagttttgggaggccctgtgccacaaccccccagcaagagcccacatgaatccgccatctcgcccgcagcctggggatgctgctggattttccgggtgtggaggggcccaggtcccccgagcagctcctctgaccccgcaacccggcatctcctgtgcccgagtggcgtctgtcagttgctcagtaagtggagggctttgctgtcccttctgctgtacccacagctgcccgctcagagcaaggtggctctgatcctgcaggagggggctctctttgagagcacttgggtgtatcgtgtctcagaaaacccacatggcttgtagctgtggctgcctaacagcaccacctgggtggttgagtggctcttccagagacccttaagtggatgggctccccagccaggcgtggtccccactgctaagtatgttataggtgttgacccacttagtcctcccaaaaaccctgtgaggcaggcactatccagttttacacatgaggaaactgaggcacggataagttgggttgtttgcgtgagccacacaggtaggaagtggcagaaccaggatttgaacccagaccatctggcttcataatcactctgctatacttcctgccagcctgttctcccccgccgacacacacgcacgcacacacgcacgcactcacacacactcctacacattcctctctctgtcatatcacctggtttattttcttcatggcacatatcacagtggatttgtgggcttgtgtattgcctgtctacaccctatagtatagcctgtgagctcctgtttgaccataggaattctgtgtcttgtgcattgccatatccccagcatctagaacaggacctggcccgaaagagctgctcagtaaatatttgttgaatgaatgaaccgacatggccagtgacacaatgtctcactgggtaggtttgtgttattttttcctccttcgacctcgatccctcctgccactcactttatagtagaggcagtcacaggcgatctgtgggtagagcgatgattgaacccgggccgggctgaccccagagcgcacgctcctttgcccgcccctgccacactggtatctttcccttgatgctgacggagggatgtgacaccgcagccagccaggtctcctcatggagggcctcggaccacgtgtcattttagagaccccagcggcagtccagatcctgaagtccgacctttgattcaggaacagagcagctgcaggagtgccaggctgggctttctggtcctgtctctcatcctcagctccagtcagctggggattaaccccctgccgtcatcaggagaaatacaacatgggaaaccggcggtaactccactgtggtaaaggatgtgagggaaacagtgacccactgcagagggtttcctgagctctcgtgcacagagaatcgtgcgtgtgcctctgggtgggcaggggacatgcagcctgggtgaacatttcccatacactaggatgaattggcccttcctgttcatgcctctaatgccccatttccctcctacagagattttctcttgtttaacaattaaaagatagcaggctgctttgtggttctcagtcaggatgctttttagttgcaagtaacaaccctggcaccatctggccaatggttaagacatgtgatgtgttctagaagcccaggggtggatgggcaccaggtggataggatcagcagctcaagcatgtctgtcagggactcaggttctcagcctccaaaggcctctgtatgcctcttggttccagaatggcttccagtgataatcagggccacttgcccttgtccacaggcatcaggagagagagaacacaccccactgatggttataagtggttcccctcagtctacagctggtccagctgaggtcacgtgcccctcaaccaggccggtcaagttactagaggaatgccacatcctgatcactcttgaccaactgggttctgttgtctagtagctgaaaaaagcagaagtggaaactgagtagacaaccattaatgcctgccaagctcagtccctgaccaagtcccctccctaagttagcaaatcgtgtcaggcccaacagattttgtggcatttgagaacaaagaagtgtggttttcttttgaagaagtttagtgacttgcgtccaatttctgcctcctgcatcatccaccctcagttaacacccaaaaaagggggcaggctgggcgcggtggctcacacctgtaatcccagcactttgggaggctgaggcgggcagatcatgaggtcaagagaccatcctggctaacacggtgaaaccccgtgtctactaaaaatacaaaaattagctgggtgtggtagtgcacacctgtagtcccagctatcgtgaggctgaggcaggagaatcgcttgaacccaggaggtggaggttgcagtgagctgagattgcgccactgcactccagcctgggcgacagggcgagaccccatctcaaaaaaaaagcggggggtggacagggggcaagtggagtctggctgccaaagactacttgtctgatggtggggaaaaaaaatgggtgtctcctcccttgtcactgggaaggtttttgtttctctttccatcttcatcctctataggtcctttcattccttcccccagtctgaaatatttccggtgtgtctgtagctgtgcacacatccttgcaaaatatatattgaggtttgagtaaagagtcagcttccggggtttggagctctgtatctcattctttcggtttcttctggttttcaccaaatagcatgtgttcgccatctagccacgttgctggatgtgtgtccagtgtatggcgtctggcagctgaacagttgtacatgctgtacatctgccacggctcacgtgtctggtcccctggtgttgggcatccaggttgcccctagctccaccccacttcaaaccatgcttcaagtgagcatccgcctacctttgccttaggaacccatggggcttacccccaggagtcagttgcagccggagataggcattctctctccccaggggtgggattaaggcacctgccacaacacccagctaatttttgtacttttggtagaactggggttttgctccattggccaggctgatcttgaactcctgagctctctatgaggctgctctgacccgcgttcccccgagagcacaggagggtcccgcttccccatacctctcgccactttgctgttgtcctgcttcccagtttcaccaatccgaagggtgtcaagtggggtctccggggttttaatgctctgatggtgagtctggctgagtgcctcttcatgcccctgttaacctaattcaggctcccctttccaagagaggcccagtcagcacaggcattggaaggcaaattctggagccggtgacctgcgtttgaatcctgaccctgccatgtaacccagcaagttagttcacctctctgagcctcagagctgccataaatataaaatggaaataatagtagtatctatattgtaaggtattttgaggattaaatgagataatatatgtaaagcatttaagacagtgctggctgggcatggtggctcacgcctgtaatcccaacactttgggaggccgaggcaggtggatcacttgacgtcgtgagttcgagaccagcctggccaacatgatgaaaccccgtctccactaaaaatgcaaaaattagcccgacgtggtggcgcatgcctgtaatcccagctactcaggaggctgaggcaggagaatcccttgaacccaggaggcaaaggttgaagtgagccaagatcacaccactgcactccagcctggccaacagagtgagactgtctcaacaataacaacaacaacaaaaaaacagcgcctaacacatatgtgatctgaaagcattagcaattattatcactatcaccgtcattattattgttttaaagtttctaaactttcaaatgttgtatcctttcactttcaatgcacgtcagaatggctctgcctgtggaggaatttctggcttctcctgggtcgtccaagagacaatatagtcaaagttgtccgaagagcaggcttggagctactcctttctttcacatttgagtcgagtgctgtatattcatttccacgtgtgtagtttttaatttttaaaagtatgatgtgtgcgctgggcatggtggctcatgcttgtaatctcagcactttgggaggctggggctgatggatcacttgaggccaggagttcaagaccagcctgggcaacatggcgaaaccccatctctacaaaaaatacaaaagttagcccggtgtggtggcacacacctgtaatcccagctactccagaggctgaggcgggagaatcacttgaacctgggaggcggaggttgcagtgagccaagatcatgccactgcactccagcgtgggtgacagagctagattctgtcttaaaaagaaaagaaaatatatgtaaagtgtttagagcagtgcctggcacatggtaaatgctatagtcatgtttgtggatatcactacatttaccagagttttctcctctgggtagcacataggttttaatgtgacgtgataaatactttttcttcacagctagcatttgtctctgatgactatctctagacatgttctcacgttagcatgttaaatgtaccctctttctttttaatgactgcctgtatcatatggacatatcaaaatgtatttactgattctttaatgagagactcttgggtttcatcttttcgtctttctcaagtagtgctgcagtggggagcctcgtccaagaagctctgggttcttgagccagtgtttttactggagccagaattgctgggtccagggatatgcatggttttgatgtaatgaactgacaagttgccctcaaagacggttctgccactagaacctggtgtatccccaccaacagaatacagacctgttggttttgatttgtttcttagtttggtttggtttttttgtttgtttgtttgagacagggtatctctgtggcccaggctggagtgcagtggctcgatcttagctcattgcagactcgaactcctgaactcaagtgatcctcccacctcagcctcctgagtagctgggaccacaggcacacaccaccacacctgctaactttttaatttttttgtagagacagggtcttgctatgttgcccaggctggtcttgaactcctggtctcaagtagtgttcccgtcttggcctcccaaaatgctgggatcgcaggcgtgagccaccacgccccacttgagttgttttagtaatggggaatttcaggcatttacaggggtagaaatagcatatattgcctgcatgtacacagttgtcaccagattctttggtgaccaacacatggccagtcttgtttcatccattcctctgcctttggatcattttgaaacaaatctcgaacattgtatcatttcatttggggagctttaaactgcatgcccacagcgtgcctgtacatcgtggaagagaggaggacatttctataaaatcatcctgtggtgcttttcattttccatggtgtgtcttctcccttgattctcagatgcccctaagacatagacaaggcaggtgtatctgttgggaaaacagaatccactctaggtattttagcggaaggaattcaatacagggaatttggttaaaaaagttggggaggagcagagaaaccaaaaaggggcagaggccagtccctagatgagcaaccagagctgaagggcgcaaggagtagggcaccttagcagagcccagggcagtgttgggcggaggcctcctccgcgtgagatgctgtccacattggagggaggaccacctggcttctcaccacctctaccttccaggcttctgccactgcccctgttggctgagcctcaccagcagtcctgggaaatgtagttccctgtgtttcagagcaggctaggaaaagggcaggcaatggatcaaagagggaactcgatccccatttgatagatgagaaagccagagggtctaatggcctgtcaggggcacctcatttagtgacaggcaccatccctggcactgaggtaagtcccttggttgccagggtaacctgaggcagctctttgggcattgcatgccaccagccagtcactgctgcctgggatgggcctacatggttccgagttcctcctctgccggaggagtcccctccaagcttccccctcccacactcagagtggacactgccttttgttcctgcccatcgcactgggctgtgccctgaccctaaggaaagccctcctgaggacaccgtgccggagagttctgggtgctggagtattctcagggagccccctgcatgaggtaccagcatcctgggccacactagaggccagaggaatgttgtgccactgagcagcccaagctggcattgagcgggcagctctgtactcagctggcatcaggcaagtgtgggtgggagctgtgctttgtgccctcctggagctggtggcttcacggaggtgaggggagcccaggggagatggaaggtgcccagatacacaaacagggaagctcaacaccaatgtgagagtttaaaggagacagagaagcccagttacacaagaaagcctcggtcagaagcgacgtgattgctaaggtgacctgggcccttcttgtaaagcagacctgtttcaagtactttacacttattcacttagttaattctcataataatcctgtgaggtaggtatggactgttaaccccagagagttaagtaccttggccaaggccacacatctagggagtggcacaccaggaatccatataatagtggtagtaatagccatggacacttcctggtggtcacctatgccaggctgccctcagagctctacatattaactcatttaatcttcacagtcaccctatgaaggaggtacttttttttttttggagatgggggtctcgctgtgtcacccaggctggagtgtagtggtgcaatcacagctcactgcagcttcacagtcctgggctcaagcgatcctcccacctcagcctcccaagtagctgggatcacaggcgtgtgccaacacgcccagctaatttttattattttttattttttggtagagacagggtctcactttcttgcccaggctggtctcgaactcctgggctcaggtgatcctctcgccgtggcctcccacagtgctgggattacaggcgtgagccgccgcgcccagccttcttgtttccattttgtgaggttggtgcaaaagtaattgtggtttttgccatcgaaagcaatggcaaaaaccgcaattacttttgcaccaaccaaatacaaatgaggcaactgaggcacaaagagatttaagggacctgtccaaggtcacacggcagagctgagttcaaacccaggcagcctgagttcagaatttgtgcccttaacggtggctcatgcctgtaatcccagcactttgggaggccgaggtgggcggatcacctgaggttgggagttcaagaccagcctgaccaacatggagaaaccccttctctactaaaaatacaaaactagccaggcgtagtggcacatgccacagggaggccactcccatgcacagcagttaggaattggttggaagtccttggaggtgattggcctgtgagttatgtctagtttgtgttgagaaagtgtcttcgaggacaggagtggtggctcatgcctgtaatcccagcactttgggaggccaaggcaggcggatcacttgacgtcagaagtttgagactagcctgaccaacatggtgaaaccctgcctccactaaaaatacaaaaattagcggatgtggtggtgggtgccagtaatcccagctactcagcaggcagaggcaggagaatcacttgaacctgatctcagcagtgagccgagatcgcgccaccgcactccagcatgggcgacagagcaactccatctcaaaaaaaaaggaaattgtctttgaatccaagtttaggggaaaaaaaaatcatctggagttggtacactctcttggtcacaaggagaggcctttggaagaggagctccacagcttcagtgatggtgataagagaaccttttgtttggcactaactggacagcatgccctcccacacagccgtgaagccactgttgtcgtccccactttccaggggcatcacacgaccttcctggcctgtggtcgctgctcaggccatggggatggctgcgcttctgccatgagtccttggtgatagcaggtgaacggtgaagagtccatgttcccgggagcccctgctgctggtggaggaatggacaagtaaacgactgaatagagaagcacgttggaaccaagacttctccaaagccagtgcttgtaactgattcggggtgctgctgtggcgtggttaggcatagaggctcacattctagccttgtcgcttcctaactctgtgactttggtctggtgacctcccctgctggccttccgtttccttagctgtaaaatgatctggtaagacctccatcagtcaagattgcaatcggctacatgtaacaaaaaaccagtaagccgtggcttcagtaaggcaacaggtggtctcttacacatgagaagaaaagggagggagggcagctgggggcggcgccactgttggggggtgcagggacagggagcaggctccttctgactcctcatcttgctgtccccagcatgtcactctcagcctcatgctcccaagatgacggttgcaccccctgatatgacatttatattccaagtacaagagaagggtagaagaggtgtgccccatttatttattaggaaaacaatagcttcgccaaaaggtcccatcccccatcccctgcaaacttcctcttccctcacactggccataatcagatacatccttagtttagctgcgtgggaatccaggaaagtaagctttttggattagtatcctgccaccccaacaaatgtggacctctctcaaggaatcagaagaggatgggtttggatttgacaaccagcagtggagcctgaggtgcctggccctggagtaacccagagcaggagtgcgggattctcccactgcgggcctgacttctggtttgtgatgtccaggaatgccactgctttgtgccctgtttcttcatctgcatgttgagagtgatgccccctgctgaggaacacttgggagaagctttaaaacctggctgggaaggactttgaaatacatcccaccccataggagagctgaggctggcttttgtttggaaaattgtcgggttttcttcaagtggagcccagccgaactagccgattgactgccagagcccaaacatactgccctgagacggctcatttattcacctctctccctcccgctcgagtctgaacagtgtgggggctgagagtgggagtgatggctgcggctctgcggccagcatctggcacagcgcccagcacccaccaggtacccggctgaggattgactgccttgcttctgagcacctcttgatctgaggagcagtcagatcttccccagtcggtcccttctctgcaccagcaccaccctccttctgggctaggccactcttgcccccacgtgggtggctaccctggcctcctgatgaagcctctgtaccctcggcaggtcacgatctccatgacagccagtcgggccactgcccccctaaacctgccatggaggtcaactccagattcctgaacactgtggcatccttgcacctgtttttcctccatccccctcacccactcacacccctttccatggccaacttctcatccttcagggcttaaacaccaccccttccatgccatcttccttggccacccactctccagcaccctgctcccatccttcgtcagtttaccccttccttctcttgctttagactgatttgtgtgcttaagtgcatttaattaatgtttgtttcctcctttagtcagtggacagagaagggggctatcgtggttactgctttgttacttatcacatagtaagatctcaggaaatactcacctagtgaatggaagtaaatcaaatgaatgaaaacttgtttggttttttttccccctgattttgaaacattcactgaaagtaatatgaaaaaatatggaaaggggccaggcgtggtggcccacacctgtaattccaacactttgggaggcgggtggatcacttgaggtcaggagttggagaccgcccggagcaacatagccagacctcctctctacaaaaaatttaaaaaattagtcaggcatggtggtacacacctgtattctcagctactgacagaatgagaccctgtcgttaaaaaatatatatggggaccgggcgcggtggctcaacgcctgtaatcccagcactctgggaagccgaggtggtggatcacttgaggtcaggggttcgagaccagtctggccaacatggcgaaaccccgtctttactacaaatacaaaaattagtcaggcatggtagtgggcgcctgtaatcccagctactcaggaggctgaggcaagagaattgcttgaacccaggaagcggacgttgcagtgagctgaaatcccaccactgcattccagcctagagtgcactccagcaagactccatctcaaatatatatatatatgtatatatatgtgtatatatgtgtatacatatatacacacacacacacacgtatatatatacgtatatatatgtatatatatgggaaggtataaagaacagattttcgaaaaccactagtagccccagcatcaaattatcgagtctttcctgtctttttttctgggaatgcatctgcatagcctatagatgtttactgtcctaggggttgataatttctttaatggtactcctggtgttgctcattgaggttgggttttttgcctgttataaaggatactatgaatttttctgcatctcttattatttatttaggattaatttacagaagtagcattcctggttcagagggtgagaacttttttttttttcttttgagacagagtctcgctctgtcgcccaggctggagtgcagtggcgcaatcttggctcactgcaagctccgcctcccaggttcatgccactctcctgcctcagcctcccgagtagctgggactacaggcacccaccaccacacctggctaatttttttttattttttattttttattttttagtagagacagggtttcaccatgttagccaggatggtctcgatttcctgacctcgtgatccacccacctcggcctcccaaagtgccgggattacaggcctgagccaccatgcccggcctgagaacactttttaaagctcttgccaaattgcccctagaaagggatcaccactgggaacattaaaaaagaaagaagtctgttgtcctggggagtggccagtttcctggtgtgctgggctcatcgggctcctggagagccattttcctggtctcctgagggcctggtgtccccttccagcctgctgtgctctgcctggcctgggttgcagtcccggagcaggatgtttgattatggtgttgagcaaacagaacagcaggccctcgccatctgccagctggtccctcgggcttgagaagagcttcacatccagcgagggtcataactagagcctttctagagccttctgtggtgctgctgaagggtggggctggagtgctcattcctaacagtagcctggccccacaacccccattcccacacacctctccccactgggaaggaagacaggtgcccccctgcatgtctcaggtgggtagaggcgcctcccctctgtccccagctgtcacatatggagagttgtcctgaaactgcctctgtgagggtgccccgctctccctgactccctctgggctcggagggagtgcacattcccccaggcagcccgcaatgtttgtgttcatccaggcgaagtggccctgcaggttctgggagtggaaatctcttataggagagagaaagtgaatctcaagctatggcatgagagtgactggggtggcacagagggtgatcaaacagctgagttttttgttgttttgttttgttttttaagacagagtcttggccaggtgcggtggctcacgcctgtaatcccagcactttgggtggctgaggcaggtggatcacttgaggtcaggagttctagagcagcctggctggcatggtgaaaccctgtctctactaaaaatagaaaattagccaggcgtggtggtgcatgcctgtaatcccagcttactggggaggctgaggcaggagaatcacttgaaaccaggaagcagaggttacagtgagctgagatcccgccactgcactccagcctgggtaacaagagtgaaactctgtctcaaaaaaaaaaaaaaaaaaaagacaaagtcttgccctgtcacccaggttggagtgcagtggcaccatcatagctcaagtgatcctcccgcctcagcttcctgagtagctgagtctacaggtgcatgtcaccatactcagctcattttttttttttttggtagagatggggtctcactgttgcccaggctggtttcaaactcctgggctcaagctatgctcactgcctcagcctcccaaagggcttgtattacaggtgtgagccaccatgcccagcaaacagctgagatttttttttttttttttttttgagacggagtctcgctctgttgcccaggctgcactatctcggctcactgcagcctccacctcccaggttcaagtgattctcctgcctcaacctcctgagtagctgggactacaggtgcctgccaccacgcctagctaatttttgtatttttcatagagatggggtttcaccatgttagctgagattttaaaatacatttgtatacattttaaagttgcttatgtcatacaagagtaaaatctcactgtttaaaaataactcatgcaatacaaaagactttaaaattctgttattgtgaaatggaacatacatacagacaagcatgtaaaacgtgaatacacagtttaccgaagaattccaaagcaagcactcaggtaacccgggtccagaaagagaacctgctggcagcctggaacccccatgggctctggccaccagaaccctttttttttccttttttttgagacagagtctcactctgtcacccaggctggagtgcagtagtgcaatctccggtcactgcagcctccgcctccaggttcaagcaattctcctgcctcacctcccaagtagctgggattacaggcacctgccacaacacttggctaatttttgtacttttagtagagacgaggttttgccatgttggccaggctggtctcgaacttctgagctcaggtaacccgcccacctcagcctctcagagtgctgggattacaggcatgagccaccgcacgtgaccagaaccctctttctaaaagcaactgctctctgcacttcacagtcaccatttcctggcattgtgaaagctgtgttccctagatgagcaactctaaataacgtggttccagtttacctagttttgaactttatataaaaacagttgtgaactgtatatgttgttctgtctggctttttcacttagtatcatgtccgagaggtgcattctagtttggagttaatgcatttctggtcctaaagcccattttccttgataaacagacaagctttatgagttctaatatttgtacattttgtttaatgagtattagaaaaaaaataaaacgaatccaacatggatattcttaagggtttaggcagtgagttggttgaaaggatcacgttcagtaaataatagtacaggtgggctgcggctatgcctgagcagaggtgcgtgactttggacagtttgggagccccagtggtgaggacagaatgaatgcacagatggcacacaccgtcgctcccctccctgagaaaccactgttacctctgggcctctgcctcccagatctttgctctgcaatgagcttggtaggtagataaaagtataaaatatgtagcttgaaagatttttaagtgctaactttttttttgagacagagtttcgctcttgttgcccaggctggagtgcaatggcctgattttggctcaccacagcctctgcctcccgggttcaagtgattctcctgcctcagcctcccgagtagctgggattacaggggtgtgccaccacacccagctaatttttgtatttttagtagagacgggatttcatcatgttggccaggctggtctgaaactcctgacctcaggtgatctgcccgcctcagcctcccagagtgctgggattacaggcgtgagccacctcacccagccttaagtactaacttcttaaatgtgggagtatgcttttcttccgaattagtacttcttggggtttctaggtttgttctctgattaaagtaaccaaatcccttgtaatattgcacttcagggtggggtaagaatgggccaggcagaccctgcctggaatacagggaactcaggggccaggacaatgcggcacatgccagtgactcttttatttagcacatggtttggtatctgcctcctgattttttttttctttttagagatggggtctcgctatgttgcctaggctggtcttgaattcctggcctcaagtcatccgcctgcctcgacctcccagcgtgctgggattacaggtgtgagccaccgtgcccagcctttctttttctttcttttgttttctataataatcttggccaattccttagcttccctccctccctgcagatgttgagaacttggaatctgggaggaggtgaccagaggggccaggcagaagctgcctgggacacatccttagtggtgagttgacgtggggttgtgactcagaagccagaaatgtgcagggccctggccatctgtgtgcacacgtgtgcaagagatatagagaaaaacagaatgagagacagacaaggacagggccgtggagagacaggtacagggatgcagaggggtagggggacaggagtacagagagatggagcagggacaagaaacatgggacagagatggggcggagatgaagagagatgggaacaggcccctgagacatgagacctgttggctggttaactagctggttggctgtttgggtaatggattagttaactggtcggttggttatctagttggctggctaattggttatctggttggtttgggatttttgagttttgtttttttttttcatggattcagaaaatactagtggaagattcaccctgttgatggccctgttttggatgctggagatagaccagtgaatggtggcttgctggcatttgggtgttggattgctgctccccacccctcaccccgatgagtgcactgtgagtgcaggtgctgttgaaaggatgtatcgcgtgcttgccatgtgccccttagtatgggagtgccctatggggatcatcttgctggatctaccagcagtctcacgaggtggcacttaccccctctggtacatattagggccagaatttgatcctaggcaatctggctccaaagcataagcctaatttctgccttaagtcacccaggagtggagtgcaggcatttattaagtgccccggtgttcatggctctatccccaatctttagagatgacagtggttttaatggccatagatttgacctgcctgggttcaagtccctcttctgctttccctcactgggtgctcttcaacaggaacatgctgctctgagcctccctgttcccttctgtaaagtggggagaacagtagggccttcctcctcaggatgctgtgtgggctcagtggagccaggtttgaggccagtcctgagtgggggctgccattgctatgtgcagcttagggagcttgaccacagggcaggatgcccacttgggctcatggttctgtaaatgccagtttttgctctcattttattattattattatttttttttttgagaaagagtctcactctgttgcccaggctgtagtgcagtggcactacagtgatctcagcgcactgtaactgctgcctcacgggctcaagcggttctcctgcctcagcctcctgagtagttaggattacaggcgtgcatcaccacacccggctaatttttgtatttttagtagagacagagtttcaccatgttggtcaggctggtcttgaactcctgacctcaggtgatccgcctgccgtggcctcccaaagtgctgggattacggcctgctctcatttttgacaacagatgttctcaaatggggtggccccatgagttgtcacgagggcagactcgagtcagccaatcccaggttcagattccggctcctcctccccttctctttgtggccctctctgaaccccattgtgaagcacgggtgacagtagcaggtgattagaagcttcagtgcaatggtttgtgttatggtgtcatgtgctctgcacagggcctggctccccgacagccctgggtcaggggccagttaggatgatggatgattactgccagcagctgggtttcccctccacccccctccccactccaacctggataacaaggcccagctgtgtgtgtccagcacctgcaccgcccccgccggcccccagctcccatccctgccagccttcccacggcagggagccttcctggctgtggtgttccgggtgggccccactgccgccccccatcccctcagcctagagccatcctcaggttaggataagcagagccggagccaccctcagcccggcccccagcggcaggatggaaagagtgggactttaacagatgttcttttacaaggattccctggctctatttaatcaagattgtcgaatattgatttaatctccaggcccaacagatgcggtcttagcaggtttcagtggcaattagctgggatcagtttgcaggtcaggctccgtgctggcaagacactgtcttctaaaggaggcttggcctggccacaggagtgagccctggaggagggcgcgtactaagtatttaaccatcagtctagcccgggcagtggcccacgggagcaggcccgcaggctgggtcatagcagcccctgtggggccccagtgttccccccatgatgatagtggggacactcagcccgtttagggcagcagctgttcactgagaaaaaaataataataataacactaaaagaagcagcacagccacgccagggcctgcggcttgatcatgagcctggctggagccggggagatccctgcagggcagcctggagccctgatgatgcccccagttaagtacccagaaggggccacaccaacaacagaggcctctcacctgcgctttcaggcccctcgcctgactgcatcccatcatccccactctacaaacatggctgtagctgctgggtgggcctggcatttgtgcccatactccaagaagcatcccattccacttctgcatttcaaaggctcattagagcgaataggactgtgcccagaactggaacaagctgcttcatccacatgtgcttcaggggaggtcacgacagcttcccttaacccagccaaccccacagagactcagaggggcgccccacccggccctggcactggggctgccagaaaggagcctttgctcaaggtgagccaccctgggctgtctggcccctgagcccagaggaacaagggttccttgccaggtcacatttggtttgcttgagattttttaaaaagtattattatataagaaaaaatgaaggccgggcacagtggctcacgcctgtaatcccaacactttgggaggccgaggcgggcagatcacctgaggtcaggagtttgagaccagcctggccaacatggcaaaaccccatatctactaaaaatacaaaaattagccgggcgtggtggtgtgggtgcctgtaatcccagctgcttgggaggctgaggcaggagaattgcttgaacctgggaggcagaggttgcagtgagccaagatcgcgccactgcactccagcctgggcaacggagccagactctgtctcaaaaaaagaagaagaaaaaatgataatagccaattctcgtttatcactgcaggccagggatattctaagccatggcatttattaacccacatctttcctaagagttaagctgtattattatctccattttacagatgggaaaactgaggcatagagagactaggttgcctgcccaaggtctagctagttaagtgatggagctgggaattgaaccaagatagactttgcttctatccactctgctgcagccaccacaccagggaagacctccagcatctggtgataagtgagagaggcagctgtgaaggtattcacccatttatttttttaaaaatttcatctctctacgcaggcgtgtaatcatatgaacatttaacctataaataaagttcagttataccaggtagcaaaattaaaattagacatttcagtttaagtatttggggtgattacagcctctatttccctggggaatatgtgaacacaaggtggggtgcactgtccttccctcattggctctgcgtgggagcctgtcgccaggccacggaggactctgcctttggaaacatgcaaattgttcagactccatgggccctcaagtagagagctctaactgtgcagcttggaagtctctccccattctgacttctagaaggtaagggccttgcaaggggtgactctcactctgctcatgttttccctcacatgctgactttttttttttttttttttttaagatggactttcgctgttattgcccaggctggagtacagtggtgcgatcttggctcactacaacctccacctcctgggttcaagcaattcctcctgtctcagcctcccgagtagctgggattacaggtgcctgccaccacacctagctaattttttttttgtatttttagtggagacaggatttcaccctgttggccaggctggtctcgaactcccgacctcaggtgatccacccgccttggcctcccaaagtgctgggattacaggcgtgatgcgttactgcactaaaagcacttcacaccatgcttggcgtgcagtgagcacacgctaagtataagctgtgttcattcccttggggctgcgtgggcatcttgcatgcattacacatagctctaccttgctatttatttatttatttatttatttatttttgaggcaacgtcttgctctgttgcccgggtttgatctcttatttatttatctatttatttatttatttatttatttatttatttttgaggcaacgtcttgctctgttgcccgggcttgatctcttatttatttatttatttatttatttatttatttatttatttttgaggcaacgtcttgctctgttgcctgggcttgatctcttgaggagatcctggctaactgcaggcttgaactcctgggctcaggtgatcctcccgcctcagcctcttgagtagctggtactataggcatgcaccaccacacctggcaaattttaaaaaaaaaatttttgtagagatagggtctcgttatgttatccaggctggtctcgaactaccaccctcaagggatcctcttgcctcagcctcccaaagggttgaaattgattacaggcctgagccactggcctggcctagctctttttgtacagatacattgtattccctggaatagaggcacccggattcacttaacccttcttgtgctggtgggcatttgggctgttctcagttcttctgtattacagcaatgtaaaacagtcaaagcatcgtgtacctttcttgacgtagactggtgttattatcagagagacagatttctggaagtggaattgctggattaaaataaatagaatgaagccaggcgcggtggctcacgcctgtaatcccagcactttgggaggccaagacgggtggatcacttgaggtcaggagttctagaccagcctggccaatgtggtgaaacccctgtctctactaaaaatacgataattagctgggcatggtgacacatgcctgtgatcccagctactcaggaggctgaggtaggagaattgcttgaccaaggaggcagaggtttcagtgagccgagatcacgccactgcactccagcctgggcgacagagcaagattccatctcaaaaaagtaaaaataaaaataataaaataaatagaatgcacacctaaaatgttgatgcataattccagctctctctcttgactttccctagttgggaaaaactgtactgatttaacacccttaaaagcagaatggatgtgatggctcacaactgtaatcccagcagtttgggaggccaagatgggaggatcacttaagcccgggagttcaagaccagcctgggcaacgtagcaagacccagtctctacaaaaaaaaattaaaaattagccaggtgtgctggcacacccctatagtcccagttacttgggaggctgaggcaggaggatcacttgagcccaggaggttgaggatgcagtgagccataatcacaccactgcactccagaccaggcgacagagtaatttaaaattttgatgcacagttctaacttattctttctattcccccaaggggagaaaactctactgatttaacacccttaaaagcagaacaggtcatgcaggaaccctgacctgtgtgggagccttgccaatttgaatgtaacagctggacgtggcctccctctctcctgtggggactgccctgggtccctgggtaggaatttgggctccttctggatgctggaggagatttgttttagaaacaccaatcctcagccgggcgtggtggctcaagtctgtaatcccagcactttgggaggccgaggcgggcagataacctgaggtcaggagttcaagaccagcctggccaacatggcaaaacccatctctactaaaaatacaaaaattagctgggcatggtggtgcgagcctgtaatcccagctactctggaggctgaggcagaagaatcgcttgaaccccggaggtggaggttgcagtgagccgagatcatgccactgcactccagcctggatgacagagtgagactcagtctgaaaaaaaaaaaaagaaagaaagaaacactagtcctctgggctctttgacgttaaatgtggaagtgctggctttcacagccgtggctgagactccactcgttgctcttccagccagtggagcagagtctctgccatggcactagctaatgagatttctaagattttcatccatcttatttcctgagggagctctgtagtggtcccatgtatgctcaaactcccagtaaggttggggaagacatagaggggaaaaatcagattttttttttttttttttttgagacagagtctcactcttttgcccaggctggagtgcagtggcgctatctcggctcactgcaagctccacctcctgggttcacgccattctcctgcctcagcctcccgcgtagctgggactacaggcgaccgccaccatgcccggctgattttttttcttcatattttttagtagagacggggtttcaccgtgttagccaggatggtctcgatctcctgacctcgtgatctgcccgcctcggcctcccaaagtgctgggattacaggcgtgagccaccacgcccggccgaaaaatcagattcttaacgtgcaatctgctgagctgttgctgacttgctggaattttgtccttatgaatggattttaaagacagtcagcgtcattcacgtattcccacagcacactcatttgaacgatttcatcttatttggagcacagggcaaaggggtggcaggcagactgttgaggtttgaatcccacctgcccctcgtaacctttgcctcatctgtaagatggtcatgatggaagtccctacttggcagggcatggtggtttgcacctgtaaccccagcattttgggaggccaaggcaggaggatcacttgaggccaggagtttgaggttttgtgagacctcatctctacaaaaaaaaatttttaagtaaaaaattagccggttgtggtggcacacagctgtagtcccagctactcaagaggctgaggtgggaagattgcttgtgcccaggaatttaagggctgcagtgagctatgattgtaccaccacactccagcctgggtggcaaagaccctgtctcaaaaaagagaagagaaatttatttaaaaaggaaaagaagcccctacttgatacagttgttagaacacaccagttaacacacgccagtgtgtagccctgaatctggcgcatcaggagagctcatcagtgttgaccttatgtttaataccgtcatcaccgtattatccctctccactgccccgcccacatgtgagaacaaatatgttagatcccagtccaccccagacatgcatctgttcacagtctggggaagacagaagatgctcagaggcttaaaaatccagtgggctaagtcccatatcaagggtgcatgtacatccccgggagctcagcagagggaggaaagggggaattctgcctggctttagtgggacagacagcatggggggacaatcggagggaggcgaggacaaggcgctctgaatcagtgaacccctgaaataactcctgcaaaggtcaccagtgcccttcatacctataactgccaccatacgtgactctttgagcagcgtccactcctgttgacagttggtcctccccaaccacacctgcgctccagcctccctgctgggcctgctgtatctcatgtcctggctcccatcacccacctgcccacttggatgtacagcctctccgagctcggaggcagaccctcttctctctgctctctctgttccttctgtcctcacctaagactgcacagtagaatcagctgccgagcttttaagaggcactcaggcctgcgccccaccccaaccagctaattcagaatctctgggagtggggtgtggacagatacctatatatttttttttattttttatttttgtgagacagagtcttgctctgtctcccaggctggagtgcagtggtgcgatctcggcttactgcaacctccacctcctgggttcaagcgattctcctgcctcagcctcccaagtagctgggaccacaggcacgcgccactatacctggttaattttttttttttttttgtatttttagtagagatggggttttaccatgttggccaggctggtcttgaactcctgacctcaagtgatctgcctgccttggcctcccaaagtgctgggattacaggcacgagctaccatgcctggcccagacacctatatttttataaagctcctctgtacctctattgtatgctggcaggaagaccagtcccccgagcatccccatctggccttggatactggctgttcccagcttccctgctcatccacggcaggtaccctctcttcttgcagatcctggtttagacaccacccttcaaggagtcttcctgaccccctcccaactatagtgatcttcagtcctatctatctatctatctatctatctatctatttttgagacagggtcttgctctgtcacccaggctggagtgcagtggcgtgatcacagctcactgcagccttgacctcctgggctcaagcgatcctcccacctcagcctcccatagtgctgtgattacacacatgagccactgcacccagccattttatgacctttacaatgctggccacccttggaaattctattttatttctctggcgtttctctactggaggtccattcatgagagcaggggcacagtctgtcctgctcagagattttctttagcacccacagcagtggcgtgtagtagaaatagattgagtaaatgaatggatttcgagtgtttggtgcttgtagaatgaatgaatgagttatacatgactgggaaatggtgaataaatgaatatgtttttagggctttgttggctggaagaacttttttgagggatttataagaacatggtaggtgtttgttgtgtgagtgaatggatgaatggatgcattttaaggactaactagttcttcctggataaacaaatgacttgtacgtgcccagaaactgctgagtcactggatgcatgcctggaggagtcctcattccacctgggccttagagaggaaccctcggacttgatgccacatccctgagccctccagagtgcttgagccccacttagcctccatggccgtgactagatcatgtttccctgaaagggagatgcttggagcacatcagggcagccctgaacacccagggggtccctctacctctaagcaaaggcctgtgaaaggacagcccatcccacccctacaagctatctccaagcattgctttcagcttcttgggcgtgctgcttcccagggaagggcacactcgggcaccaagcaggccctgcttgccttgggtcacagaccccaactgagccagtgctccctggtcctgagtgaggttgtcatccatccagtcatttaatagttatgttgttttatctatctatctatctatctatctatctatctatctatctatctatctatctatctatctatctgcctgcctaccctacctacctgcctacctatctatgtagtgacagagtctcactttattgcccaggcgggagtacagtggcgtgatctcggctcactgccacctccctctcccaggttcaagcaattctgttgcctcagcctcccaagtagctgggaccacaggcatgcaccaccatgcctcgctaattttttcatatttttagtggacacggggttttaccttgttggccaggctgatctcgaacctctgacctcagttgattcgcccacctcggcctcccaaagtgctgggattacaggcatgagccactgtgcccaatcagatatttatttagaaaagaatttttttagagacagggtctcactgtgcaaccaggctggagtgcgtggttcaaccctgtctccttcctttgtgatcagcagggtcccaggtaagggctgctttgtctgctgggagtgaagttggcatgagcagggctctcagccagcctgtgatggacaggaaatgtgagcaagaaccaagcctcagttgtgaaagcccctgagcatctggggtcatttgttactgcagcatagcttagctcatcccgcctgtcccaagaaggaacacattttgtggatggggagtgatcaagagttcaggttgggaatgttcagttgcagtgcatgtgagatgtgtaagtggtgatgtcaagtaatcaggtgggtaggggggtttggaactcagaagagcagtgggagctggagatgttttccgcattggcgacacacgtttaaatgagaatcacagaggtccaggcgctgcctgtgattgcaaggaaggctggtgcttgaactcaggactgtctgacttgaggtaagaaggggctggggttgagtccccactgtgtcaactcatagccatgtggctatgagttacttcctctgtctgctcctcactttcctcatctgtaaaatggaggtaataatgatacccacctcatggggttgttgaaagggttaacacatagcaattgacaggtgtgaagtgctctggaaaggacctggaccatagaaggattctattcatggtagttgctgtcgtagatactggcttttgtgtatgttttcattgttgttttgttttataactaaaatgtccagtggtgggaaatggaatagggctgactttgtgtccaacttgatgcagagactcaaatgatgactacagccccagattctaactcccagtccccttcacagatagttcttctcccatggttacgagacagctgcagcgactccatccctcacatcttctcagacttagggttaaagggaaaagcgcagccttcagctccagcactcctggtaaagacatcacggtctcactggttctgatcaggccacatgggttgctccagagctggggaaggagccccacctctagcccattgggtggccattggagaggggaggctcccaaagggaagtcgggactgttggaaaaaggagtcctggcgacagggaaagtaaaccacaactgtccacattggagggctcttgtgtttccctatgctgtgtcctgtgagcttctggcagacattgcagccctcacagagttgggccttttggagccaagacaccaaggctgtggggcttgcttgcttgtcgcaggggcaatctgggagcatttacacccacagatacatcactggttgcctgctcttctaacagaccctgatgcgtccccactggcccagaggcaatcaggatggctacagatgctggctctcccagcttcccttgcaaccggagtggccgtgtatccacattctagccagtgggacataaaagaaaggattgcagcaaggggaatgttctgggaaagattctccttcctgattagggtcagaccggtgccctcaccattcctatctttcccctttgcccatgattcagtgggaagtgtggctgtggccaccagcttgtgaccgtgacgcagcaagccagaagacttgctcaatcctgcagcacaggagggaggcagagggaatggggggacatgcttcacatcgctctccagctttcccaccaggcctggagccgccatatctggcctcctggtgacatgagatgactaaatgtcttcaccgtgcaaagcaccgttggatagtcttccgttactcgcagccaaacacatcccaactgactgtctcccactgccactcactcctcattttgctgctgtctcccaggctgccctagttttccccatatacagttccccagctgccctccttcacacagcaccgtgtgtcactcggggtcctctgatgccagcagcagaagccacgcttggcagtctgtggccgaatcacaattcactgaggatgtacagaatgaacacgaggccagaggagcaatcttagaaaacagggagggagccaaggaagccctggagggaagaaaccaggggtccccagcaaaagtcactgcacaggagaagccaggtccactgtgcctgcccctgcaaggacactttccagcctcacatgctcttagaaacctcgcacggagtcctaggagaggaccctgggccgaccaagcccacgtcctgtgcccactccaactgtgcttctgtggggggaaaggggaagcacttctgccaaagatacacaacagaactgtagtaagagcaggtggtattatacccattttacagattgaaactgagtcactatttccataacccgtccatgacacacgaggattgagcccaggaggcagtctggttcctgcctatgctgtgcttctctcatcacgggggttccccatcgggaaggtccaagtgcttttagggaggaggagctcggtagaagacagctggaaagagaccagtgtgcaccctctgagtcccagaggctgcgggtgccactcagcctctgaatgtcacaggaagactcgactgcagctgctaggagaagggatttgttcagagagacgaaggcctgcaagaacatctgtgtgtgtgcacagaagggagcagaatggattgagggtttctgactgagctggaaacaaatgccatcagcaaagcccatctgtcgggaggtgcttgcataagcaagtcagggtcgcatctgggccactggttttcccaacccagccttaagtgtggcctcaaaggactaatcctccctccgcactctgcactctgaaggcagagccacaacacaggctgggctgctgaggacaggcagcgccctcaggcgggccatcatcccagcttgacctgggatctggtgcccagcacagcggactgtggggcagggttcaggctctcaagcaaacagtcttgccattctgtaactgacagtttagagtggagacaataaacaccatagataaaataattgcacttttctctggcaaaccagcaacccctgctgaagtgtgacccacacatacttattttgtttaccctcattgtgtgtgtgtatgtggtgttttgttgttgttgttgtttgatttttgagatagagtcttgctctatcacttgggctggagtgcagtggcacaatcacagcccactgcagccttggcctcccaaatagctggaactacaggcatacgccaccacgcctggctaagttttaaaattttttgtagagatggggtttcactgtaatgcccaggctggtgtcaaactcctgggctcaaacagtcctccctcctcagcctcccaaagtacgggtattacaggcatgagccactgtgcccggcttcattgaggtttttattgttaatgttcttaggaagtgcattttacccttgaacaacatgggttggaactgcgtggatctatgtatacatgaatttttttcaataaatatattggaaaattttttagaaatttgcaactatttactgggcgtggtggctcacgcctataatcctagcactttgggaggccgaggtaggcagatcacctgaggttgggagttcgagaccagcctgcccaacacggagaaaacccgtctctacaaaagacacaaaattagctgggcgtggtggcacatgcctgtaatcccagctactcaggaggctgaggcaggagaatcgcttgaacccgggaggcggaggttgcagtgagctgagatggcgccactgcactccagcctgggtgacagagtgatgctccgtctcagaaaaaaaaagagatttgcaactatttgaaaagaacttgcaggggtgggtgcggtggttcacgcctgtaatcccagcactttgggaggccgaggctggcggatccctcgaggccaggagtttgagctaggcttgccaacatggtaaaaccctgtctctactaaaaatacaaaaattggccaggcatggtggtgtgcacctgtaatcccagctactcaggaggctgaggcaggagaatcacttgatcctgggaagcagagattgcagtgagccgagattgtgccactgtactccagcctgggtgacagagcaacactctgtctcaaagaaaaaaaaaacagaaaagaaaagatcttgcaggtgaaccacatagcctaaaaatattttttaaaaaataaaatgttaaggccgggcacggtggctcacgcctgtaaccccagcactttgggaagccgaggtaggcggatcacaaggtcaggagatcaagaccatcctaacatggtgaaaccccgtctctactgaaaatacaaaaaatattagctggccgtggtggcgggcgcgtgtagtctcagccactccagaggctgaggcaggagaatggcgtaacctgggaggcggagattgcagtgagctgagatcgcaccactgcactccagcctaggcgacagagcaaggctctgtctcaaaaaataataataataataaataagtaaatacataaataaataaaaataaaatgttaggtatgtcatgaatacataaaatatatgtacattagtctatttttctattttatcatttgctaccataaaatatacacaaatgcattctaaaaagttaaaatttatcaaaacttacacacacacaaacacactgccaagccaagagaaatgtaaacaaacataaacatgcagaattaaatcataactgcatgaaattaactgcagtacacactgcactaccgtcatagtttcgcgaccacctcctgttgctactgcggtgagctcaagtgttgtgagtatccatttgaaacaccgtgtgacactcatcatctccgcatgagcagtttgtctctccagcaaattgcacatcgcagtaaaaaatgatccctagaggttctcacctagttttcatcgtgtttagtgcaatactgtaagccctgaataacctcaggggacccgtacaaagtgccactagtgatgctggaagttgtcccaagaagcagagaaaagtcataacattacaagaaaatatgcaattgcttgatatgtgccatcgatggagatctgcagctgcagttgcccgccatttccagataaatgaatccagtgtgaggaccatcgtaaaaaatgaaaaggaaattcatgaagctgtcactgcctgtatgccagcaggcacaaaaaccttgcactgtttacaaaatatatttttatctcgtgttgcaaatgcagcttctatgtgggtacaggattgctataaggcatacctatagattgtaatttgcttcgagaaaaagtgaagtcattacatggcaacctaaagcaaaaggaagaaggaggatctcaagctggggaatttaatgccagcaaaggatggtttgataattttagaaagagtatggcttaaaaaatgtcaagatggcaggagaagcagcttctgccaaccagaggcagcagatgagttcccagatgccagtgagaaagtcattgaggaggctgggtacggtgcctcacacctgtaatcccagtacattgggaggctgaggtgggaagatcacttgagcccaggagtttgataccagcctgggcaacatactaagaccccacctctaccaaaaatttaaaaattagctgggcatggtgacgtgcatctgtagtcctagctactcagaaggctgaggcaggaagatcacttgagccctggagtttgaggctatagtgagctatgattgtaccactgcactccagccttgacaacagagaaagaccctgtctctaaaaaaaataataataaaaatgaataagaaaaagaagtaagcctgttcataagtgctaaggagaaaaatggagcagaggaagggcctgggagtggtggggatagacacacagaggcaagcactattagttttttgaaaattcttccgatcatctctgcatgatagtttgttgttgtttctgttgttttttcttttttctttttctttttctttttttttttttttttttttttttttgagatggagtctcactctgttgcctaggctggagtgcagtggagcaatctcggctcactgcatcctccacctcccaggttcaagcaatcctcctgcctcagcctcccacgtagctgggactacaggtgtgcgccaccgcacccagctaacgtttctatttttagtagagacggggtttcaccatgttagccaggctggtctcgaactcctgacctcaggcaatccacttacctcggcctcccaaagtgctggggttataggcatgagccactgcgcctggccaatatttttgcttttccaattgggaaatgttacatgcaactctagatttctgatttctgttggaaaatcagatgatctgacatccatactcccgcaagccttgattgtcagaagatgccctgccatccaggtcagtgcaggctcctcttggcctctctcctgtctcccttaggcaactcgaccctgagggctttccagcttcctctctcttctgtagcccatccctgtgctgcctcccggcaacatcttcaggatcgtttgtgttctcgtggggcaccaggaagaggggctcccccttgctccccactctccacctgccctcttctggtgctcactttttcagaggcttcaggctccccttgctatttgctccttgaatctgctttgagcttcccttgtgatctctgccagtgcgctccataactgggcataaattaggaaaagcccccctacacatgcgcatacatgcacacacacacacacacacacacacacacacaggcacacagacatgcacacacacacacaggcacacagacatgcacacacacacagacgcacacagacacgcacacacacagacacgcacacagacatacacagagacacgcacacacacacagacacacacacacagacacatacacgcagaagaggcctgctactttctcacacaggaagctccaatagccattgatcaagaacggctgcatccagctctagattcccagggaaagaaaagttagaggtcaccttgaaccaagtgcgtggcccaaagcagcactccactgccctgagcaaaatcagttccgttggcaggagggagcgggcacggctgctgggcagtcaacagcttccatcacagacggcgacccactttccccttcctctccagcaggattttcatcttctagaagttcaaggtggagacaaagggaagtgaccccgcagggtgttttatatgctggacagaagcacagactcccttccccaggggcctgcaaatcaggaggtacttacacctccaattaggcagaggccatctgttcactcatatgtataatactaaacgaacgtcctggacgttctagatggctcacgcctgtaatcccagcactttgggaggccaaggcaggcggatcatgaggtcaggagatcgagaccatcctggctaacacggtgaaaccctgtctctactaaaaatacaaaaaaattagccaggtatggtggcaggcacctgtagtcccagctactcaggaggctgaggcaggagaatggcgtgaacccaggaggcggagcttgcagtgagccgagatcgcgccactgtactccagcctgggcaacagagcgagactccgtctcaactgttctaggcactgggaatgcatcagtgaacaacacagacatccctgccattctggagccaacatttgagtggtggacctagccagtagacagaacgaacaactgctaagaaaaattggaagaaagtagagtgggtaattaagaaaggcttccagaagaccgggcttctctgtctctatagggtgatttgggaaggtttttgtgtttgtttttgtttttggggatttttttttttttttgagataggatctcgctttgttgcccaggctggagtgcagtggtgtgatcgtggctcatgcaatctcaacctcccgggttcgagtgatccttttacctcagccccctgagtagctgggactacaggcacatgccaccatgcctggctaatttttgtatttttagtagagatggggttttgccatgttggccaggctggtcttgagctgctgggctcaagtgatccacccgccttggcctcccaaagtgctgggactgcaggtgtgagccaccgtgcccagccggaagtccccatggaagaactgacatcatgggaaggaaccagccccaagaaggactgaggaaggatatcagatgtcctggataaggtttggtgcatcagaacagaaaagaaggccagtatgatcagagcttagtcagggatggggagagacatggaagccagatcctgcggggcttgtggagcaggggaaggagtttggatggtgttttaatgcagtaagtagtcactggggagatctcagtgaaaaagtgatgggctctgatttacccagtcatagtctgcagtaaccacatggatttctagagacattccttctgcagctttcctccccaaactccactggtgctcatgttgactcatctgtcattttcacttcctttctggcagagtagctgagctgagcaaacaacagagcaggtggacaatagtctggcctctgcatgaagccaccagttcacaggaaatacagggggcagaggaacatgttaagtggcacctcagggatcctgaaagtggggaaatccacaggacaggtgacccctttccttcaacaagtaaagagcatcaaaataaaggaaggtggccattgtagagtagaggagacttgagaaaatacctgcataagcagaggatgatttcgaacaaaccagctcacaaaagacacctgcgagacaatgatgggaaatgtaatgcaggcagggtagtgcatgacattaaagaattcttgttaatgtagatgagtatgataatgttactgtgatttttttttttaaatcttatgtactagagatacaagctaaaatatttatgggtgaaatgacctgatgtctggccaggtatggtggttcatgcctgtaatcccagcactttgggaggctgaggcgggcggggattgcctgaggccaggagtttgagaccagtttggccaatatgacaaaaccccgtctctactaaaaataagaaaaattagccgggcatggtagcacatgctggaattccagctacttgggaggctgaggcaggagaatcattcgaaccttcgaggtggatgttgcaatgagccaagcacatgccactgcactccagcctgggtgacagagcgagactctgtctcaaaaaaaaaaaaaaatgatgtctggggtttactctaaaacattctatcagaaacaaagaaggtcacaaggctgggtgaatagatgaaatgggaatggaaaatagttagtggttgttggagctgatgggtgactcagtctcctctctgcttttgagtatgtttgcaaatttccataataaaaagattttttaaatgagtaaggctgtcaagaaaagtcacatgtcccactttctgggagcagtaacacggccatcgcagctcatattttccttttcttccatttcagcatggcgaggacaacatccttgctgcctccagctggcgggcgaccacagctactgcctgctctgcgctactgagccactcggtctggagcccccaggacagcacctgcttcctgaggttgtcctggctcagctgtgcacagcgatggtggagaactggactccacaggctcacaaccttcctgtcaggtttcagggcccagcatccttcatcctgggcctggctgccctgaacaatggctgagggctgggggaccccatagagtgacaccacagcgtacggggccagcagcactccagtgcccgtggactatgaccacctatcgggccatccccagcgatggtgtggacctggcagccagctgtggcgccagggtgggcgatgtcctccctgggccacacacaggggactacgctcccttgggattctgggcccagaatggcagcatgtcccagcctcttggcgagagcccggccaccgccaccgccaccgccaccgccaccacccgccccagccccaccactcccgcaatgcccaagatgggcgtgcgcgcaagggtggccgactggccgcccaagcgggaggccctgagagagcacagcaacccaagcccctcccaggacacagatggcacaaaggccaccaagatggcccattccatgaggagcatacagaacggacagccccccaccagcaccccggcttcctcagggtccaaagccttccaccgactctccaggagaaggtccaaagacgtggagttccaggacgggtggccccggtcccccggcagggccttcctcccccttcggcaccgcagcagcagcgagatcaccctcagcgagtgtgacgcggaggacgcgggggagccgcggggggcccggcacacgggggcgctgcccctcttccgcgagtacgggagcacctcgtccatcgacgtgcagggcatgcccgagcagagcttcttcgacatcctgaacgagttccgcagcgagcagcccgacgcccgagggtgccaggccctcaccgagctcctccgggcagatcctggcccacacctcatggggggcggcggcggagccaagggggactcccacaacgggcagcccgccaaggacagcctcctgccactgcagcccacgaaggagaaggagaaggcccggaagaaacctgcgcggggcctcggcggcggggacacggtggactcgtccatctttcggaagctaaggagcagcaaacccgagggggaggctgggcgttccccgggggaggccgacgagggccggagccccccggaagccagcaggccgtgggtgtgtcagaagagcttcgcccacttcgacgtgcagagcatgctgttcgacctcaacgaggcggccgccaacagggtgtcggtgtcgcagcggcggaacaccaccacgggtgcttcggccgcttccgccgcctcggccatggcctccctcacggcctcgcgggcccacagcctcggaggcctggacccggccttcaccagcacagaggacctaaactgcaaggagaacttggagcaggacctcggcgatgacaacagcaacgacctgctgctcagctgcccgcacttccgcaatgagatcgggggcgagtgtgagcgcaacgtgagcttctcccgggcttccgtgggctccccgagcagcggcgagggccacctggcagagcccgccctgagcgcctaccgcaccaacgccagcatctcggtgttggaagttcccaaggagcagcagcggacgcagagtcggccccggcagtacagcatcgagcatgtggacctgggcgcccgctactaccaggattacttcgtgggcaaaggtgacggatggcgtgtgggtgggaaggttgggtgggccgaggcttgcctccgagacccccactactcattcattcactctgtgccaggccctgctctggcactgaggatgtggcgggaacagagacctcccttctggagggctgtgaggatccggtgagcagagccacccgggcctcagccctgtgtctgacacagcagcactccataaaccttgagctacaggacacagctctgcatttactcagcacatatggacttggggacagctcagtgccaggcactctctagagcctggggatgtagtatcaaccagcttaaaacaaatgttctgtcttcctagtacttataatgttttcatgggtaacacaaacatagaacaggataaatacgaaaaatacacaagggattgtaggctgctaaatgcagtggaaaagagtacagcagggaagaaggaaatggagtgtcggagggtgggggcagatcccagtgggggatggtcagagggggcctccgaggcaggtgcagtttgagtaccaagctgaagtcaccatgtgcaaattgcagacactgttcccagaacagagcagcgaatacaaaagtcttggaactgcccggcgcagtggctcacgcctgtaatcccagcactttgggaggctgaggcaggcggatcacttgaggtcaggagttcaagaccagcttggccaacatggtgaaaccgcatctctactaaaaatacaaaaaaattagccaggcatggtgacatgtggctgtaatcccagctacttgggaggctgaggtaggagaatcgcttgaacccaggaggcagatgttgcggtgggctgagatcatgccactgcactccagcctgggtgacagagtgagactctgtctcaaaaaaaaaaaaaaaaaaaaattgagaattgcttgtaactgctagtaacaggcttaaacaacatagaagggactctcctgtgaagaaatccagagttcagcagcccagggctggtatggtcagtcttaagcatcagtatggtcagccttagtgcatggcatgatcccccactgctccacaccaagatggctgctggagtgccaggcgtcacatctgtgtttccaggcagagaaaaagaggaaagggtaaggacaaaaaggcagacctcttgtcaagtcaacccccttatgcccttatgcctagtgtttcattattggaacgctaagcatgtgggagttatagcctactgctcaaggacattgccagggtctgaatttttacttgtggaaaaattcaaaaaattgcagcctccggcataaatgcgttaaagagctttctcagaagcccggtccaactacttgcacttagtggccacacctgtgtgcaaaagaggctgggaaacgcaggtttttagctagacaaagtttttcttttccaagaatagagggcttttcttaaaaaaaaaaaaaaaaaaaaaagacgaagtactagcagctagtaccccacagcagctaggtttttttttgttgtttttttctttttctttttttttttttttttttgaggcagtctcgctctgtcgcctcgcccaggctggagtacagtggcgcgatctcagctcactgcagcctctgcctcctgggttcacgcgattctcctgcctcagcctcctgagtagctgggattacaggcgctcgctatcatgcccagctaatttttgtagttttagtagagacagggtttctccatgttggccaggctggtctcgaactcctgacctcaggtgatccacccaccttggcctcccaaagagttgggattacaggcgtgagccaccatgcccagctcacagcaactagtttttaaaaatatttaaagtaatatccttgtcaaacataacaaatgtcagttaagtcatcccacaggacactggagctccaacttggagtcagacagccctcggtttggggtatctgttccatagctgatccacgtgatacgttttacccttcagactgtgtgacaaatgaagatgattatatcaatatcacatgcacaaacagaatgacacagagattgaaaagaaagggataaaaaagaagttccaggccgggcacggtggctcacgcttgtaatcccagcactttgggaggccaaggtgggtgatcacaaggtcaggagattgagaccatcctggctaacacggtgaaaccctgtctctactaaaaatacaaaaaattagccgggcatggtggtgggcgcctgtagtcccagctactcgggaggctgaggcaggagaatggcatgaacccgggaggcagagcttgcagtgagccgagatcgcgccactgcgctccagcctgggcaacagagtgagactccgtctcaaaaaaaaaaaaaaaaaaaagaagttccagacagttgcttacaaggaaaaagccaatgaggcaatgtcagtatcacatgaaatagatgtaaaggttgaaagcaccttttagaggaactaaggaggccatttcatgtttcttaaagttcgccaagaaattctggtagttgtgaaccttcgtatacctggcaacttggtttaggggtacctagatttaaaaaatggatcaggctggctgagcgcattggctcatgcctgtaatccccgcactttgggaggcccgaggcgggcagatcacgtggggtcaggagtttaagaccagcctggccagcatggtgagaccctgtctccactaaaaaatacaaaaattagctgggcgtggtggcgggtgcctgtaatcccagctacttgggaggctgaggccggagaatcgcttgaagctggaaggcagaggttgcagtgagccgagatcgcaccatcacaatccagcctgggcgacagagtgagactctgtcccctcaaccaaaacaaaacaaaaaaaaaacgctacggggagaagtagaaaaactcacaaccatagcgggagaagtgcacagattatctctctgaagttgacagaatctagtagctgaaaaataaggatttagaggatttagataacctaatgaaaacttgattttacactgtatatgtattaactttgtacctaaccaacaaagaacacattcttttcaacctacacgtacaaatacgtacatgaaaggaatgtggatcaaataaagatcaaataagattatacattaaaatacttagttctttgttaggcaggtaggaagtactcatcctggagctttaaaaaaaaaagccgttttctttttaaaaatttctttgtagccctgaaagctgttaaagaaaaaaacgttctggccaagcacaagggctccctgaaagtgtaattccaccactttcggaggccgaggtaggatgattacttgccccaggagttagagaccagcctgggcaacatagtgagacctcaaaaaaaggttaaaaatttagccaggtgtggtggtgcatgtctgtagtcccaactgttgtggaggctgagatgggaggatcgcttcagccctagaggcagaggttgcagtgagccatgattgcaccactgcactccagcctgagtgacacagcaataccctgtctcaaaaaacaaaaactcttcaataatatttgttaaagcacagtaaagaatgtattcagaaccatcacagcaggcatagggaccactgcagcggagtctggcagtagggaagagagattgggcttaactctgaatacagcgtagtcaagtaggaatttatagccaagaagcaaggtggggatcagtgcatggaagaaactattaagaagaaatgtcagaggtaaggaagattctggctaaaccaacctaatgttgctgatgacacgccaggatgatcagacatcacctttggatggtggaagatgaagagcttgatcaggtgttgaagatgtccagatattgaggataaggttggggggcagggttcttgctaaactgacttagcgcagggttctttgttaaaactggattttacaaggaggtgcacagatgggcctaggagaagattccaaagcctgactaaagtttggccaagcaaagaatctttgtcaaagctagtaaataagtcattggtcagtgtttattgagtgcctactatatgctaggattcgcaaggagctagatatgcattgatggaaaaagcaacaacccctgtagctgcttcaggaataagctggtatttgtgatctgtagagtacaatgtttattccattctctgatcagctggagattgttgaaccccctgcagatgctgttctgatcggggtcattaattaccacacagtattttgcccttagactagcctttgatttgccaagagcatctcatgagaaccagaaccatcagttaaacattcagtgtaccagtacaatttccggtggtgggtagatgctaactttgtggacttggatcaagacagaccgctggcggatacccacacaagcatgagatacttgggttatacatcaggaagaactatttgcctggaagggttataagatagtagcatgttttagaaaaaaagaggaggcagctgtcaggtagacgagggagcaggaggtgtgtcccatgcctggctaaagcctctgttaccctaagggaaaaaacagcagtgttggccgggcacggtggctcacgcctgtaatcccagcactttgggaggccgaggtgggcagatcacaaggtcaggagatcgggaccatcatggctaacatggtgaaaccccgtctctgctaaaaatataagaaattagccaggcgcggtggcgggcgcctgtagtcccagctactcgggaggctgaggcaggagaatggagtgaacccgggaggtggagcttgcagtgagccgagatcgcgccaatgccctccagtctggacaacagtctcaaaaagaaaaaaaaagaaaaaaagcagtgttgaagttacctaggtaaagaaacatggtgagataaaggtgatgcctaggggcccctatcgtggtccctgacaggcaccaacaactggggatggtcattgccaacactcatcatgtgcgtactatgtgcctggcacggtgctgaaggctgggtccacctttaactttacggctgaaaatgctatctagcgacttggctggggccagacatctattaaggggcagagcccaggtgtgaggaggctctctagaatctttcttaacagtttcacaagggctaatccgcagttaaaccaagtggaccatttgcaaacacgggattaatcgcagtgatgctgggttgatggcatgccatgcactgtactaagtgtttcatatttgtagcttcatttttgccttcacatccactctctgaattgtgggtggcatcaaggtcctgttttctcagatgagagcgctgaggctcagaaaagttctgtggcttggcaggtggtacagtaaggtgggcttttgcctcttacagtgtctccactgggggtgtctgtgaccaggcatgaggtttgcgtgaccagcatcccacagattgcacaggaccctgcctggtcgccctgtctgcaggcctgctgggcatcagggcccctccttcccagacagctgagcctgaactcgcctgctcttccttcttagaacatgccaattacttcggcgtggatgagaagctggggccagtggctgtgagcattaagcgggagaagctggaagaccacaaggagcacggacctcagtaccagtacaggatcatcttccggacccgcgaggtaggtcccatcactctcgttcttattaaagaaatcatagccactcacatctcgagccaggttctgggggcaaacgcttccccagcttcatctcatggaatcctcccaacaaccccgggagagcaatcctgttagtctctccatctcacagaggaagaaactaagacgcagaatttaaatgacttctggccaggcatggtggctcacgcctgtaatcccagcactttgggaagcttggcgggtggctcacttgagatcaagagttcaagaccagcctgaccaacatggcgaaaccccatctctaccaaaaatacaaattagccaggtgtggtagcacgcgcctgtaatcccagctattggggagactgagccaggtgaattgcttgaacctgagaggcagaggctgcagtgagctgagtttatgccactgcactccagcctgccagcctgggtgacagagtggtgagactgtgtctcaaaaaaaaaaaaaaaaaaagaaaaaaaaaattaaatgatttctataggatcagtgaaccagtagccagaccaagatttcagtccagggtgtctgacttcagagcccaacattacaaaacctgtttgcaagagattagctctaataagcataagaaataaaagggaaggtaagggatcattttaggaacatgaggtgtcctacgtaatggaaagaattaaggcaacaagcctcaggcaggacaggaactggggactctcaaccacaggtactgctgttatgccaatcagctcaaggtactcccaatgtgtcactttccattctgagtagagaagcccatggtcctggctggaagccttcccctggattaaatgtcaactgtagctagtgaggaaggcctgttggggcacccatgctctattaggactctaaattgtaagtgacagaaatctatttctaacttgcttaagtcagaaatagcattcattggttcatgtaactgcaaatctaggggtagggcaaacttccggcatagctggacttagagactcaaatgcagtctccagaactctgcttctttaactctctgcttggctctgctttttgcatcgcgagtgtcattttcttctgccactaacaagctctcaccatgtcatgggaacatggagatgggctgctcaaatctacttctttgcactgtctcttccaaaaggctcagactggccaggcgcagtggctcactcttgtaatcccagcactttgggaggccgaggcaggcaggtcacctgaggtcaggagttcgagaccagcctggccaacatggtaaaaccccgtctctactaaaaatacaaaaattagctgggcgtggtggcaggcacctgtaatcctagctactcaggaggctgagacaggagaattgcttgaacccgggaggcagaggttgcagtgagctgagatcgcgccattgtactccagcctaggtgacaaatgcaaaactccatctcaaaaaaaaaaaaaaaaaaggcttacactgatttatctgggaagaactctggctctgctttagatcacaagcccaagtcctgagccagtcgctgtgatcaggggtggtagaggaaactgcccggtctagcatgtgttacccaccttgggtccaggggcagggccaggcactgtgattgacagttccaccagagctccctggaggaggaggcagggcagatcctcagcaaaaagaggggacccagggaagcagaaatgacagagaggcccagaagacccaaataaggaagacctttcagaaaagtggcatttgccagctaggcaggccctccaaaatgggtctccctcagcctgcattgccccagccccttgggcctggcctttgcccagacatggacgcctagcaggctgaggctgccaaggacttgactgtggggccagccaagtcctggacctcatccaggctggcagatgcagctcggagtgccctcgccccatcccctgaccaagaccttcccactgagttgggggaatgggatggcatggaggctttgcagtagccaggaagaggcagccctaaagccatgtgcgccaaaccacaggtggtcaccagcctctgtctccccagccctctcctccctctacccacctttctggccagatgagcaccagagcagaatgagaggtgacagctcacactgcatctggctgttttaggacatatgggcaactgctgggtggtgaaatgacgcctacagtcatatacttataaataggctgggtgcagcggctcacacctgtaatcccagcactttgggaggccaaggcaggtgggtcccttgagccctggagttcgagaccagcctggccaatatggtaaaaccctgtctgtactaaaaacacaaaaattagctgggtatattagtgcacacttgtagtcttagctgctcgggaggctgaggcatgagaatctcttgaacccaggaggtagaggttgtagtgagccaagatcacaccactggactccagcctgggtgacacagtgagactcggtctcaaaaatatatacatacacatatgtatatataaaatatttattatgaaggctattattactgcaaatctcctttatactgtgtgtcaggcaatattctataccttttatatctattaactcacttaaatctcatcacgattctagggtgaagaccctgttgtcctcatttacagatgacagaacaggcacagagaggttaagagacttgcccaaagcaccctccagggagtggcagggcagggtgcctgcctgtgttctggccgccgcactcggctgcctctgggttttgactaagtcagcttagactgcacactggacccactcatgagttaggagctcaaccaactcagtgctagcgtttgtgtttttgttcgtaatgaaaatacaataggcggggcgtggaggctcacgtctgtaatcccagcactttgggaggctgaggcgggtggatcacccgaggtcaggagttcgagaccagactggccaacatggcgaaaccctgtctctactacaaatacaaaaaaaaaaattagctaggcatggtagcaggtgactataatcccagcttctcaggaggctgaggcaggagaatcgcttgaacctgagaggtggaggttgcagtgagccaagatcattccattgcactccaggctgggtgacacagtgagactccatctcaaaaaaaaaaaaaaaagaaaatacaatatataggcaggcatggtggctcacacttgtaatcccagcattttggggtaagaggttaagacggaaggattgcttgaagcctggagttcaagaccagcctaggcaccatagtgatacccgtgtctctaaaaaataaaaaataccagactatagcattaggagaaatacctaatgtaaatgacaagttaatgggtgcagcaaaccaacatggcacatgtaatacctatggaacaaacctgcacgttgtgcacatgtaccctagaacttaaagtataatattaaaaaaaaaaaaacccagactatgtcacacatactgagagtcgtgagactttagtgcatggatactgggttatataattttttgctgtgatttcctgttcactaagtttgaaactggcttgatgccattcccagtgtgtacctgctcccgtccacttcccacccccagcacctacaaaactagccgtgggggactctgatccatccctgatgacagcacggggactctttgagtctcacagccacaggcctgggatccatccattccacagacatttgctcagcgttcccccgtcccagctctatgctgggcatggagggtaccgtagcaaacaaggcagcaaagatgctcgtgagactgggtgtttgagggggagacaaaaggacgcagaacaccttagcaaattatgctgtaggtgcttcccatggtgacaaggtgggggacaaagcaaggaggaatgatgagtgtggcaggtgcttagattttttttttttttttttttttcccgagacggagtctagctttgttccccaggctggagggcagtggcgtgatctctgctcaccacaagctccgcctcccaggttcacgccattctcctgcctcagcctcctgagtagctgggactacaggctcccactaccacaccctgctaattttttgtatttttagtagagacggggtttcactgtgttaggcaggatggtctcaatctcctgacctggtgatctacccgcctcagcctcccaaagtgccgggattacaggcatgagccaccacacctggcccaggtgcttagatttttaacaggaaggtcaagggaggcatcactgggaaggtaacactggagtaaacctagaggaggggagagggagccgtgtggacaactggaagaagagcattccaggcagagcgaacagccagtgcagaggtcctgaggcggagccatgctccgtgggttggagacgtcctgtgagtcctagtttgaccactcagcagttctagaaccttgggcacatggctcctttcctctcagagcctcagtttcccccttggaaattctcagcttacagaactgtgttgtgggctcggtgaggttgcacataccaagcaggcagtgggggacctgacacttgactggaagtgattatgatcggcaccactgttgcagccgatgttccttcccaggaggtcagagccccatgctgggaagcataggttgagctcacggatggggttctgtccttctcatatccacacacacacatgccttggggtcctgtaaaccagggcataggggccagagcgagaggtctgggctgccttccaagccagccagcctgccccagatggccgtccccagccgccaagcagacagtctcgagtggacctgcatctcccagcagatgggatatgagcattggcagtgccaggctccccaccaaggcaggaacagacttggagctgggctttggcactgcttgtccaaaccccagagagcctggacagggtgagcgccaggccagggctgccctgtctcaggtccctttggcactgtctcacccaggacactggggacagagtggggatggcaaccagccaggaactgtgtggcacccccccacaaggcccagtggttctcattggcctagaacacgtgatttttgacaggctttagttctgatagggttagagatttgggtttttattttattggtttttcttttttatttaaaaagtaccaaacgctcattattaagaacttagacaatacataagtatgcaaagtagaaaaaggaaagtttcattagtgaaaaaagcaagtgtgaccccgtttttgttcaataggtacatctgactgtgtgtgtgtctgtgtgtatttgcttatttatttttgagacaaggtcttactctgtcccctgggctgaagtgcaatggtgcagtcatagctcactgcagcctcgaattcccgggctcaagcgatcctcctgcctcagcctcccaagtagctgagaccacaggcatgcaccaccatgcctggctaataattttgttttatttttagagacagaatctcactatgttgcccaggctggtcttgaactcctgagctcaggtgaccctcctcctttggcttcccaaaatgccgagattacaggcatgagccactgcacctggctgtgtgtatgtttaaatgaacaatctccaaagcatattgttaagtagggggaaaagcaaaaaaatgtagcttcctgcttaaggttaaaaaatttaaaactcagctaggtgcagtggctcacacctgtaatcccagcactttgggaagctgaggcgggaagattgcttgagcccaggaatttgagaccaacctggacaacgtagcgagaccccatctctattaaaaataaattaattgccaggcgtggtagctcacgcctgtaatcccagcacttttggaggcctacgcaggtggatcacctgaggtcaggggttcgagaccagcctggtcaacatggcaaaactccatctctactaaaaatacaaaaattagctgggcatggtggcacacacctgtaatcccagctacctgtaatcccaggaggctgaggcaggagaatcacttgaacccaggaggcagaggttgcagtgagccaaaatcacaccattgcattccagcctgggcgacaagagcgaaactctgtctccaaaaacaaaataaataaaaaagaaataatatttttaaaactattaactatgcatgtggctttgtacataaacatttaacacacatctacagataataatggttaacacacattgagctctcactctgtacccaagatacagcactaagcattatgcacggatctttttgaatcctttcattgccttgaggcaggcatttttatccccattttatcaatgaggaaatagggaaattaagcgacttgcccagagtcacacagctagggaggagctagagctagaattcaaacccaggcagaccacctcctaagtaacctcctaggaaatgttcttgaagggtacacctgccgcccagcacagagtcaagcggggagtacgtctgagtcaggagtgagtggggataacctgtaccagctggaacctccttgtttgcatggtactgtgtgcctttcacagctcacttgatttgttgccctcgactagctgatgccagatgttttcaggctctgagcagaggaaggctgtgatctgactcaggcagctgtagaaagaatggactggggacagggcaggggcagggagacctggaggaggctgctgtccaggtgggaggtgatggtgggggtgaccaggtggagagtgaggtggccactcatgacctgccagtgtcccacttactgtcgccagtgctgaaggagtttttcaagtagtgcgcgccgatgaggtggtcagagccaaaatgtgactgtaagtcacccgtctccagggaggaagaaggaagatttctggtccgtgctgtccctcgttcccagcagagggcactgtgggacagtgtcagtaggatataaagacactgatcctgttggtcttaactgaaacccacaaccccagggccacccagattgacagggcaaagcccccaacatcattgcttttcatgattggttttgacactaccgtgcttgtgataagagagatttgtttgtttgttaattaccggggccagaagtgggatcattctattccttccacacatgcctctcgcccaggtgctctttggtgagggtgggttgtgtgcttagaggcgaagtcatgacatgttatttttgccacctcctgtgtttgtcgacttaggcaagcatgtttttgcagttaatacttatcctccttagtctttttgttgttgttgttgagatggagtctcactctgtcgcctaggctggagtgcagtggcacaatcttggctcactgcaacctccgcctcctgggttcaagtgattctcctgcctcagcctcctgagtaactgggattagaggcatgagccatcatgcctggctaatttttctattttagtagagacagggtttcaccacgttggccaggctggtctcgaactcctgacctaaagtgatccgcccacctcgacctctcaaagtgctgggattagaggtgtgagccaccgcacctggcctcctccttagtctttaaaccacagccccaagtgtactttgggtgcttgtaacaagccccctggagagggatttttctttgtgcgttcttggtgtggtgctggtccagtgcatggcataacctggtggccagcagcatgctgtggctacaagcatgagctggtattagtgaggatgtggagcagcaggggctctcagacagggctggtggggtgtaaattggtacaaccacttggaaaactgtttggcagttcagtaaaattgaagattagcatgcctggtgatttagcaatttctatcctaggcataaacccaaaagaaaaggtgttcgtgtgcactgaggtgcttctgtgagggttcataacagcactattcacagttggcaaatactggaagcagttctggtgctcatcaacagtgaaaaggagtaaaacgtcagcctctcgcaacagcatagctgcagctcatatatgtagcattcagagaaagaagctagataacaaaagaatacaaactgcctggctgggcgcagtggctcacacctgtaatcctggcacttcaggaggccgaggcaggaggatcacttgagcctaggagttgcagaccagcctgggcaacatagtgggactctgtctctacaaaaaatatacaaaattagccaggcatggtggcacatgcctatagtcccagctgctcaggaggctgaggcaggggatctcttgcgcccaggaggtcgaggctgcagtgaaccatgattgtgccactccattccagcctgggcaacagagttagaccctgtcttcaaaagaaaaaaagaataaaaaaatacaaactgcctgaagttcaaaaatagacagatataaatgatggtgttgaaagtcaggatagagttaattttgaggaaaaaggggtacaaatgggctgtgggtgctggaaatacatttcttgatttggatagtgattacccaggtatttgctttctgatactttctttggcctcacatctatgtgttatgtactttttttttagacggagtttcactcttgttgcccaggctggagtgcaatggcacgatctcagctcattgcaacctcctcctcctgggttcaagcgattcttctgcctcagcctcccaagtagctgggattacaggcatgcgccaccacgcccggctaatttttgtatttttagtagagacagggtttcacccatgttggtcaagctggtctcaaactcctgacctcaggtgatctgcccacctcggcctctcaaagtgctgggattacaggtgtgagccactgtgtctggcctgtatactttatatatttggatatacctcaccatacacataccaaatatatatatctcaaaacaaaccacgagcttcggagaagtcaggactgggttggaatcttggttgccattttgtcagctgtggtgaccttggataaggcacgtaacctcttggaacttcaatttgcttctctgtaaatcagagataaaacctcccttgaatagacctatacatacagttattactatagtacctggagcacagtgcagtgaactgcaccttcataaatgtgacttgttattaaggtatataagttagacatttatttggctgcaaagcgatagaaaacctgactaccagtagctaaaacaaagggaggttactttaatcatctaataagtctggacgtaggcagctgcaaggattaacttctgtgactttttgttgtctctttcctcatgattgcaatctggctgccacagctccaaacatttcattctcataccactgcccatcacacaaagaagtgggcaggtggaaaggggctttcattttttttttttttttttttttgagacagtctcgctctgtcacccgggctggagtgcaatggcacaatcttggctcactgcaacctccgcctcccaggttcaagcaattctcctgccacagcctcctgagtagctgagattacaggcatgcaccaccaggcccagctaatttttgtatttttaatggagacagggttttgccatgttggccaggctggtctcaaactcctgacctcaagtggtccgcccgcctcggcctcccaaagggggctttccttttattagagggaaatctgccccagaagtcctcaccaagcacaattctcctcatatctcattgcctggaattgatcacatggttgcctataggaaaaacttgggaagcaacatctggggaatgggaatgagatggctgtgattggctttgactaaaggttttcatccctgactgcacatcagaagcacctgagaaggattaaaaatatgccatgtatgcaaacatgcatgtctggccccatcccagaccaaccaaattagaatcactggtggtgtcttgtcttgtcttgtccttttcttttcttttcccttctcttctcttctctctttcctaccctccctcctttcttttcttctcttctcttcttcttttcttttcttttctcagactgagtgttgctctgttgcccagactggagtgcagtggcgcgatcttggctcactgcaacctccgcctcctgggttcaagtgattcttctgcctcagcctcccaagtagctgggattacaggtgcatgccaccatgcctggctaatttttatatttttagtagagatggggtttcaccatgttggccagggtggtcttgaactcctgacctcaagtgatccgcccaccttggcctccccaaagtgctggggttacaggtgtgagccacccacgcctggcctttttttttttttttaaatgaaactggtctgaaaccagtgccacagttcaagatccaagatgatgccagtattcaaggcaggtgggtgttttacttgagcatttacagtaatgtgtacataatacagtgttactgtaataatgacaagagcccacctcctggtaggacctgttttcttcattatactccctactgccttacataattcatctcccccattccagtgtcagctccacaaggacaagggtctttgttcattgcacctagagtaggactcagtgcctcacaggaggcactcagccagtatatgttgaacaaatgaaggtagtttacattattgtctcatttaatcctcccaacaccccttcaaggttacgataccatcctgtacccatttcacaaaagagcaagctgaggctcagagatatgaagtcacttggtcaagaccgcacagccaggaggcagcaggttcaagttctggctcagacttagggctttctgaccttagagcacaaacttccaatcatcacacatgtctctttcaaaacaagatacctctgctatgctcttatccctttttaggtctcgagagccccctaaccttcccttctctcccttgagtagctcatcaccctgcggggctccatcctggaagatgctacgcccacagccaccaagcatgggaccgggcggggcctgcccttgaaggatgccctggagtatgtcatccccgagctcaacatccactgcctgcggctggccctcaacacccccaaggtgacggagcaactgctgaagctcgatgagcaaggggtgagtcaggggctggaggtgggggtgctgctggggcagtaccttgcaaccccactcctggtagctttttctatcttggtcactttcttttttctttgcaagtaacagaaacctacttaagctggtttcagcaaaaggagggattcaaatcaaattctagtggtgccaagagcaagaatgtaactgggtctcctaaaggagggagattgtctgggggtgagatagctgctaggtccccatgtgtgcatgcatatatgtgtctatagtggggggttagtgtgtctttcctccccgctccacatgctggctccctctgcttctcttgcctctcccacagctcccagtctgttagaattacagccacatgcagaccccagcaggctgaccctggtcacaggagagccatcgattgggctatggcgtaggtcaggtggctgtccatggcccagtcaccagtgaccagggggatccgggatacctaaagcaaacatagttattgggagcccactccctaaaaaaggtattgactataagccttgagccctccagattttgcttttgcagaatctcagcccatcccagtccacctactgtgggatgccggccaaggcaacagtctctttcatgcaagtgtggcatcaccagccgtcctccacccgccatagcgagaagaggcggcctggatacctcgttgtgcttctctggagtggaagggagggggagggacaactgggacatgctgccatgccccaacactgttttcccctgtctggctatggctctgggttcccgagtggtcccagcagctcccagggcctcaggcctcagacataccccttgctcccttccctctgccatctctgcctggcctgcctccacaaagccactcttgcctctgcagctctgccggaagcacaaggtgggcatcctctattgcaaggccggccagagctccgaggaggagatgtacaacaatgaggaggccggccccgcctttgaggagttcctctccctcatcggcgagaaggtctgcctgaagggcttcaccaagtacgctgcccagctggacgtcaagagtaagtagggggccggttagatcacagtgagccaccactgcactcctactcaacaggcaaagcttaaaaggcctggggatgccacggtggggacgtggagcagtgggagctctcagacttcacttgtaggagcacaaataagtgcagccactttattttttcgtgttgttgtacttgttgttgttgttgttgttgtttttgagacagagtctcactctgtggcccaggctggagtgcagtggcatgatcccatctcactgcaacctctacctcccaggttcaagcaagattctcctgcctcagcctcccaactagctgtgactacaggtgtgcaccaccacacttggctaatttttgtatttttagtagagacaggctttcaccgtgttggccagactggtctcgaactcctgacctcaagtgatccacccacctcagcctctcaaagtgttgggattacaggcatgagccaccacgcctggccatgtgcagccactttggaaaacagtacagcacattcaagtccagtttgaagagacgctgctctgtgactcagctcctgcactcctaggtatgcactctgtctaatgtgcacgtgcatggcaggagaggactgaatatccctaaccaccggcacctcggtgcacccagtgcacactggcagagttgcgccgtgttcacccagaggagatgaactggcaccacaggcatcagcgtggaagagagccacatgcttcgtgctgcgcaaagacagcaagcctcagaagagtgggacctgaatgatgtcttttacataacaatttttttcttttcttttcttttctttttttttttttttttgaaacagtctgcctctattgcctaggctggagtgcagtggcgcaatctcagctcactgcaacctccgcctcctaggttcaaggagttctcctgcctcagcgtcccaagtaactgggattacaggcatgagccatcactccctgctagtttttgtatttttagtagagatggggatttactatattggccaggttggtcttgaactgctgacctcgtgatctgcccacctcggcctcccaaagtgctgagattacaggcgtgagccaccacacctggccaattattattttttatagagacaaggtcttgctatgttacccagactggtctcaaacacaaggcctccagggatccttggcctcccaaagtgctggaactacacacatgagccactacacctggcaaaaaggtccagcaggatgactcacacctgtaatcccaacattttgggaggccaaggaaggaggattgctttaggccaggtgttcaagaccagcttgggcaaaaaagcaagaccctgtctctgaaaaaaaaaaaaaaaaaaaagcaaaaacaaaaacccagcaatatattgttggtggatatgctcttacacagtggaactctaaagaaaaacagagccaagcgtggtggctcatgcctgtgatcccagcactttgggaggctgaggcgggtggattgcttgagcctgggagtttgagactgcagtgagctatgatcatgccactacactccagcccggatgacaaagcaaggccccatctcaagaataaataggccgggcatggtggctcatgcctgtaatcccagcactttgtgaggccgaggcgggtggatcacctgaggtcaggagttcgagaccagcctggccaaaatggtgaaaccccatctctactaaaaatacaaaaaaattagctgggcgtggtggttcacgcctataatcccagctacttgggaggctgaggcgaatcgcttgaacccgggaggcagaggttgcagtgagccaagaccgcaccattgcactccagcctgggcaacagagcaagactccgtctcaatcaatcagtagaaaaaaaaaaaaaacaagggaatactggagacaatatgcaggatagtggttggctgtctggggagaggtgggtgtgtctaggaaacggtgctcacgttagagtgtgggtagtggtctttttcttaaggtggtatcacataggacgtatttgttgcagcagtctctgtgcttatcatgtgtatgtgtacataaatatatatgatatatggggctgggcgcaatggcccacgcctgtaatctcaacactttgggaggctgaggcaggtggatcacctgagggcaggagttcgagaccagcctggccaacgtagtgaaaccccgtctctactaaaaatacaaaaatgtaaccaggtgtggtggcacatgcctgtaatctcagctacttgggaagctgaggcaggagaattgcttgagcctgggaggcagaggttgcagtgagctgagatcacaccactgtactcgagcctgggcaacaagagcaaaacttcatctcaaaaaaaaaaaaggggccgggcgcggtggttcacgcctgtaatcttagcacttgggaggccaaggtgggcggatcatgaggtcaggagatcgagaccatcctggctaacagggtgaaacaccgtctctactaaaatacaggcgagcgcctgtagtcccagctactctggaggctgaggcaggagaatggcgtgaacccgcaaggtggagcttgcaatgagccgagatcgcaccaccgcactccagcctgggcgatacagcgagactccatatcaaaaaaaaaaaaaaaaaaaaggaaagaaaaaaatatatatatgtatatgatatataggattgaaatgtttcatgagaagtagctgggtgggtggatgggtaatgttcacaggtgtcacagctccctggggaatggactaccactgtccttgggagtgggttttcgtcagctgggagtgagaaggccccaagatggctcagtcagacattgctcttccccacacctcgccaagactcggtttgctcttctagaaaacaaaacagaagcccagatcaggagacaaatcttagagagagaagtgaggtgttaggcaggtgtctggggccatcatcaccttcccctgctcctccgctgaaggaggctgtaggaggaacgagcatgttattatgccatttgctagtttcgtgatcttggacaggtggctttgcctctctcgacctcagtttcctcatctgtagagtgaaggtaataattgcgcttatcttggaagcatggtgagggttccgtgggtcagctttgccccaaacatcctgagccctccctctgtgccgagtgcttcccagagctccgccagcgtgggtgtccccctaggtgggcggggaggcagcaggcctccctgggctcacctggcgtggaggaagctggcaggtgtgagtgttagtattggtttttttgtttttttgtttttttgagacagtctcgctctgtcacccaggctggagtgcattagaacgatcttggctcactgcaaccttcacctcctggtttcaagggactctcccacctcagcctcctgaatagctaggattacaagcacgtgccaccagacccaactaattgtgtacttttagtagagatggggtttcaccgtgttggccaagctggtcttgaactcctgacctcaggtgatccacccacctcggcctcccaaagtgctaggattacaggtgtgagccaccgcgcctggccaggaagtgggttctcttagaggaccccaggaagcatagtgctcctggaatgagtttccccaaattacaggcaagaatggccctggcttgagcagatacctgggtgttacccggctcccaacctggctctggcactggcagctgtggcctcagtgtccccgccagacactgaggcagcattgaatattattaagaacagatctggaggccaggcacagtggctcacgcctgtaatcccagcactttgggaggctgaggcaggtggatcacctgaggtcaggggttcaaccagcctgggcaatgtggtgaaaccccatctctactaaaaatactaaaattactaaaattatccaggcatggtggcaggcacctgtaatcccagctactcaggaggctgaagcaggagaattgcttgaacccaggaggcagaggttgcagagagcccacattgcgccattgctctccagcctaggtgacagagtgaaactctgtctcaaaaaaaaaaaaaagaacagatctggaatccaacagcctgagtactggtccagacgctaccactcagtacagtgtgaccttgggaaggcactccctctccatgcctcagtttcccactctgaaacatgggctcagtaagcaggtttgcctcttcctagccataaccctccctcctattagagagaactcatatcctgatgctcaatgataaccatttctttgcttttcttcatagttttgctacttacctacacatccctgactggtataatctgacctgcttttgcatgtcacatgaatgggatcacactgtgtgtgctgctttgtgtcagcatctttcactcaacatttagaggatttccccatgctgcagccgcgactcattccttttcctggctgtatatttttccacagtgtgaattgaccagtgtgttcacccattcttttgactgacgcttgaagattcttgtacccatatcccaggacacgtgtgcatgatttctctgggctgtggtccaaggaaaggaagtgccaggttatcaattaagcctatcttcaggtataagagagattgctaaaaagttttccaaagtgcttgtaccaagttacacacctaaccagccacctcaagggttccatttgctccacatcctcgccaaccattggtgctgtcagactttttaatttttaccagtctggtgggtacatagcaatggggtttcctttttatctaaatgtatttaattttttttttttttttgagacagagtctaaccctgtctcccaggctggagtgcagtggcgtgatctcggctcgctgcaacctccgcctcccgggttcaagcgattctcctgcctcagcctcccgagtagctgggactacaggcacccgccaccaggcctggctaatttttgtgcttttagtagagacggggtttcaccatgttggccaggctggtctcgaactcctgacctcagatgatccacctgcctcagcctcccaaagtgctgggattataggtgtgaaccaccaggcctggccagtgtatttaatttttaagagtagattgaagtgaaagcaccaagttaaaaaccagcacagatggtacgtgggatatggcaaaaacccagaggttttggaaacatggtcctaactggcatttctgtttcagccgactccacgggaacccactccctctacacgatgtaccaggactacgagatcatgttccatgtctccaccctgctcccttacacccccaacaacaggcagcaggtcagtgattttcagcagaggcacggctgccggatgttggctgcccacccaccagcattggccctcccagttctgtcctgtggatcatatggaggcccttgaccttggaggccatctttactatggtcactttccctgggggttagagagcagcccaggtgtggttcgagatgtcactttggccccagtctttcctgctgcttcttgggcgccctgcccagccccagctagcccgacgcccctccagggcctcttgagtcatcactggtcttaagaagaagagtgaatcagtcaacattattttgactgcaagtaacagaaactcacaccaaactggcttaactagaaaaagagatttatgggttatataactctaagattgtagagagggctggcctcaggtctggttggatccagggactccaacaatattaggaatccttccccatttctcacctccacttttctttacagcagctttattcacaggtgcaaagcaaagatacctcctagcagccctaggctcacatccaccagcttagccacctcagcagaaagagtgctgttttttccagttgtcccagaagtgtttcagagctgagtctcattggactattcacatgccagtcttggggcctggggtaggggtggaaagggcagactggccaagcccgaggctcatgcccaaccctagagagggtgagtggtgccagctcaacttgaaacggatggaggttggggaggtgctttcctgaactgggtgggtgtggctgccagcaggaggcagggataccaggtgggcagcgccaccaaacactcattgccaagaggctgcagctgtgacccggctcctctcttggacccaccttgcaggctgggcccacagagcaattcttccagttcctaatgaacagaagccccagagtgctgacagtttaggaagtaagtgtacgtattttcccagttggcacaagtgactttgtaggccaaaaatgctcaaatattgatttcctaaggttcatctaaaaacatgctattaagagctttggtcttaggccaggcttggtggctcatgcctgtgatcccagcactttgggaggctgaggcaggcggatcacctgaggtcgggagtttgagaccagccaggccaatatggtgaaaccccatctttactaaaaatacaaaaattagctaggcatggtggcgtgtgcctatagtcccagctactcaggaagctgaggcatgagaattgcttgaacccaagaggcagtggttgcagtgagctgagatcatgccattgcactccagcctgggcaacagagcaagactctgtctcaaaagagaaaaaaaagcaaaaaaaaaaagcgctttgatctcagaattagacctgaatttgagttctttcttggctacttcctagctgtgtgatctcaggtaagtgatctcacctctctgggccttgagtccctgctgtgtaaaatgggtataatcgtagtgcccctgaatcagggtcattgagaaaggtccatatactcctgcggcaaccggagcgtgacagggcccgacacacaggaggggcgcagagagcagtgccttttcctgagtatgtgggaggggcgctggggaaaagcttgagtcgtagagttaagaagtgggttagaatccaggctctttccctccatcactatgtgacttaggtaaaattacttaacctctgtgagcctaagttttctcatctgtaaaatggggcaaaatgagttaacgcctctcggggttgttaagagattcattgagatgatgaattgaagataaggctgtgcagtgtttagtacaggaccagccacagtcaatagctgctttagcgatttgatttaatgccacttaaaactcacataaagaactaaccattcaacagtaggagttgagctgcaaagcgtgtctggagttcacactgtgagccatgtcacttagagctccgtgggactcccgtccatggatctcctgcattggcagattctttaacagctacatgaatgctagaactgtgtaaataagaacaatataataggctgggcttggtggctcacacctgtaatcccagcactttgggaggctgaggcggagagatcacctgaggtcaggagttcgaggccatcctgaccaacatggagaaaccctgtctctactaaaaatacaaaattaactgggcgtggtggcgcatgcctgtaatcccagctactcaggaggctgaggcaggagaatcacttgaacccaggaggtgcaggttgcagtgagccgagatcgcaccattgcactccagcctgggcaacaagagtgaaactcagtctccaaaaaaaaaagaaaaaagaaaaagaacaatataatctcagcaaataagccaaacactgtgaatacggcgtcacctgtgaagataacagagtcttcctcggagactgaccagcaggggagaggtgtattagtccattttcacactgctaatgaagatttacccaagactgggtagtttataaagaaaaagaggttaaatggactcacagctccacatggctggggaggcctcacagtcatggcagaaggcaaagaagaaccaaaatcacatcttccatggtggcaggcaagagagcttgtgcaggggaaccacacttttataaaaccatcagatctcgtgaaacttatttactatcacgagaacagcatggaaaagacccacccctatgattcagttacctcccaccaggtccttcccacgacatgtgggaattatgggagctgcaattcaagatgaattgtagggtgtggacacagccaaaccatatcagagggtgagagtcccatagggcactcggaagccacagccatcctgacctcagtcagggtccagggaaggggtggcgcctataactggccctgccagtgacctgggatctgactctgccattgtccatgggtgtggctttgagcaagttgaagaccaccagcctgtgctctctggatcttacttattgagtacctcctgtatgccaggcactgtgctgggtactgaggatacagcagttggccgtgaacaaaatccctgttctcatggagctgccacttcaatgggaagagacaagaaacaaaatgaagtggggaaagccatctctgctgagtgtcaataagtgttaagtaatggggacagaaaagcaaagatcagggagtgttgtggtggggtggatctgaataacgtagtcagcaaaggcctccctgggagggtgaggtttatgcaagaccagaagaggtgacgaaggaagccatgtggggactcaggaagaatgttcctagcagagggaacagcggtgcagaggcttcgaggaagtgtttctggccatggtgaggcctttgtcctttatcctgaatgagagggaaccacaggaaggtttgtcacctgactcgggcattccttgggctgtgtgtgagcagggagtgggaatgggggtgggtggggggagctgtggcagtggtccaggcaggacccgtcaggccgacctgtgacaggttcctgtccccctctgttgccctttcccagctgctacggaagaggcacataggaaatgacatcgtgacgatcatcttccaggagcctggcgcgctaccgttcacccccaagaacatccgctcccacttccagcacgtcttcatcattgtccgagtccacaacccctgcactgataacgtctgttacaggtatgccccccacacccggcccccagcagcgtatggagagaggggcaggcagctggcccaagtgggtcccagtacagggcccccccacacctcacgttgtgcttcaggagaagagctcggcgtatactccccacaccatctcagagagtggtttttagccagaaaggggcatggctccccacttttgctaaggaaaccatcagggatttgtatttgcttgtaatcttttgtttcaagtgacagaaaacccatgtcaatgtggcttaagacaaaaagacagttgtgtatataggctctcaaaagtggcacctttaggcctggctggatctgccaccgccctcctgggggtcacctttccagcaggtctgaggtgaacatcctaccagctgcaaatcccccaaaatgagagcttttctttcccaagagttgcatcagaagccccagaattggggctcactggcccagttggagtcgtgtgcctgtcctagagccaaaatcaccagccaggcctgggcactgggcttcaaggaccaagaggcacgagtgatggcccagaggaaagtcggagggaagcagggcctacctgtggaggtaggccccactttggaggtagaattgaggaggtttttgttgttttgggtttttttttttttttttaagacagggtctcactctgtcacccaggctggaatgcagtggtgcagtcatagctcactgcagccttgacccccccgggctcaaacgatcctcctgcctcagcctcctgagtagctggaactacaggtgcacacccccatgcctggctaattaaaaaaaaatttttttttagtagagatggggtctctctgttttacccaggctggtcttgaactcttggcctcaagtgatcttccagcctcagcctcccaaagtgctgggattgtaagtgtgagccaccgcacacagctgagatcttttcgtacctgtacatgaagtgctttttgttctttctgatacttcatattccattgtatggatgtggagtcatctcctgtcctctactgatgggtattacggttgtgatgcctgcaatgaacagtcttatttatagtctgattgcgcctgagtccaagcatacagctgtaaaagaaattctagaaatggaggtgctggagcagaggacgtgtgtatgtgcaccagtagtcaccgcgaaattaccgcgggtctaccagctgcctccctcggctgggtgagggaagggaggggcatcccagcctgcagcgctggttgtctagcacctctgtgctgcacatgttgcccgctggctactgggagccagcacactgcatggcagggcctccttacaggcatgtccctggacctgaggccacctctccccctgcccatcggttcctggaacatgcagcagcagctacagagtgcctgcacctcaggccctttttggggttgaggacccttggatgagatgggagatatttacacacatgcacacgcacacgtgcacaggcacatgcacacacacacatgcatgcacgcatccgtgcacacatgcacatgcacacacatacatgcacacacgtacatgcacacacatgcacacaggcacacacctgcacacaggcacacacatgcacacacacgtatgcacacaccatgcgtccacacatgcacacacacgtatgcacacaccatgcgtccgcacatgcacacacctacatgcacacacatacatgcacacacatacaggtacacacctgcacacaggcacatgcatccacacacatgcacatgcacacacatacatgcactcacacaggcacgcataaacacatgcacataacacatgcacacacctgcactcacacaggcacacacaagcacatgcacatatgcacacacatatgcacacatacatgcacacgcacacatacacacatgcacacactggaaaaggaggcagccttcttatgatgcatcagaggtggagggttgagctggtggggggagctgctttctcttcttcgtccccactctgacctcccctctcctactggggtcatcacatcagcctgcagctgacctccctcccttccgggctcgcctctgcatggtctccagagtgatttcttctctctcacacacaaacctttcttgttttttataatttaatttaaaatatttttattatgcaatattttaaccattctgaaaaatgcagaaaatcatttaacagagacccatgtgcccaccgccagctttaacagatgttaacattttgctttgtttgcttcggctctccctctttccttcatttttaaagaaagaaaatgttagagatacaaccaaagctgctcctcagccatccccctcccttcccatccctctttccccacaggcagctcctctctggacagacctgaccctgcctctaccctgtggagggagcccggacacagctctccagcttaccatctcctgaaacccccaactcctgtcccccaactcagtgaatttctaattgtccttcaagactgaactcagggcgaggtgcagtggctcacgcttgtaatcccagcactttgggaggctgaggtaggcagatcacctgaggtcaggagttggagaccagcctggccaacatggtgaaaccccatctctactaaaaatacaaaagttagccaggtgtggtggcaggtgcctgtaattacagctgttcctctggaggttgaggcaagagaatcgcttgaacccaggaggcagaggttgcagtgagccaagattgcaccactgcactccagcctgggctacagagcgagactccatctcaattaaagaaaaaaaaaaaaagactgaactcagatgagcctctgacaccctccagtggttccttacctgctccatgtgccattgcccaacatgtttctgtcatagcacacatgacaccataaaaatgatatgatgggctgggcatagtggctcacgcctataatcccagcactttgggaggctgaggcaggaggatcacttgagcctgggagttcaagatcagcctggacaacatagggagaccctatctctaaaaaaacaatttacaagttagccaggcatgctggcacgcacccataatcccagctgaggtgggaggatcgcttgagcccaggaagtcaaggctagagtgagccccattgcactccagcctgggtgacagagcaagactctctcaaaaaaaaaaaccaaaaaaaacggaaaaacagacatcacgtggctgttgcctcctttgacagtaaccccatttcatgtttagcttcctgtatctgtcacagcacagagcttggcacatagtgggccctaaagccatctttgcttggctggaaagacacctggcccaaatgttgcaggcactgaaaaaataattgttgaataaataattctgagtgttctagcaacgcttcttgccctctggtgatcaggtgaccaccaggtcccctcgtctgctggttgtttcgtgagttttcatcctttctgtttcaagtgtgcaatttccgaatggccacccgcatcatccctgcagcctgtggactctcaaaacccagtccctcctgctgggaagtaagggaccagctgttctgatggctcaaaaaccttcagccgtttgcaattttatgatttgtgaaatcatgaatcaggaatataggaaaagcctaaatctgtcactataagcagctaagtgctgaataaagaagttacaaagctcggctgggtgctgtggctcatgcctgtaatcccagcactttgggaggccaaggtaggtggatcacctgagatcgggagttcaagaccagcctgaccaacatggagaagccccatctctactaaaaaatatataaaattagccagtcatggtggcacatgcctgtaatcccagctactcaggaggctgaggcaggagaatcgcttgaacccaggaggtagaggttgcagtgagccgagatcatgccattgcactccagcctgggcgacaagagcgaaactcttgtctcaaaaaaaaaaaaaaaaaaaaattgcaaagctcttcatctctgtaaagtgcaatctgacaatctgactgccccattcagtagagagagggacaggggaggtcatctcatccatccccctgcctggggtaaggccatgtccacaagatttcccacagaagaaaatttacctggtgtgtgtggcattctttgaagcatgtccgctctggaaaatgcctttttctgttaaaactatgcccaccataccttggtagaaacctgtttcgtctgtccatgtttaaaccattactttagtcagcattgagcaactgtgctggggaatccactaagcctagggcggcatccagccacgtggcactcctggggcatgaaggatcactagccagtcaacgccagagatggagagcgagggggatctggcctgatcggccggggtcgcgcagtagctcccacactggtctcctgcatgtgccctgtcctcccgtccattcttcatgaggcagccacagtggtctccgcagattgccaatctgttgtccctctgccagcacctgcctctgttgggaacccagcgagaagcagatctccctcaaggatttaaccaaagggagttgatgccactgacagaggtgtggggagcttacgggaaccatgtgggaagatgctgcatccagggactagccagagcaggaacctttatccacccccaagccttgatgggctcagagggagacgggagatgtttctgaaagctgatgagagctgtggccctgggagaggggcggcccaacaggagcagtagctgtaagggaccaaagatgacagccactgacagtttcatcacagcccctcacagtggaagggaagagaaataaatactccagcctctctcctcccaccttcccattccctgctggtgcttctcattggccaaactcagctggaagccccagggcacaggaacccaggtgacagagctagagagatcttccttcctgagcacagagcagggcagagaacggcagaatggatcagagggggcagacaggaaatggtttcaccaccagatcagatcattaaatggttgcctgctcccatggtaaggataggaagtgctaactcaccagggccccgtgtggccttgcccctggtgacctcatggcctcctgctccttgccttccgggccatgcccaccctggccttccctagtcggctgctacctgtgctgcaccccctggctgcagcactctcccccagctcttcctctggttccactcagcccttagatcccagcttcatcatcacttgctcagagaggccctcccagattctccctgtccaaatcaggtctttctctagttctgtcataacatgccctgttccctttcctcatctttatgagtttatctctgtgtgttgatttggtatgtcccttctcctggactagaagctctgggaaggcagggaccacgttatccccaatgcctaagagcgtggagtccaggaagtgcttgtcaaacaaatggatgagtgtcgcactgtcgcccttgtctagagttgggggtaaggggagggaatcaacaaaacctgggcaagcatgactttgggttggagtttcatggagtgtttttaatccataatctctatttttttaaattatcctacagatggaagagaaacagtaggaattctgtcttgacactgtactgacaaataggttttaatcaaggatgaaaataccatacatttttaggaaagcatagttaacttattgcatcaccctgtgccattaagaaacataaagagaccgggtgcagtggctcacacctgtaatcccagcactttggaagtccgaggcgggcggatcatgaggtcaggagttcaagaccagcctgaccaacatggtgaaaccctgtctctactaaaaatacaaaaattagccaggcgtggtggtgcatgcctgtaatcccagctactcaggaggctgaggcaggagaatcccttgaacccaagatgcttgaacccaggaggcagaggttgcagtgagccgagatcgcgccactgcaatctagccagggcaacagagcagcaagactctgtctcaaaaaaaaaaaaaaaagaaagaaagaaaagaaaaagaacaggctgggtgcggtggctcacacctgtaatgccagcactttgggaggccaaggcgggcagatcacttgaggccaggaattcgagaccagcctggccaacatagtgaaaccccatccccatctctaccaaaaatacaaaaattagccaggcatggtggtgcacgcctgtaatcccagttaccccagagactgaggtgggagaattgactgaacccgggaggtggaggctgcagtgagctgagatcacgccactgcactccagcctgggcgacagagcgaggctccatctcaaaaaataataataatagaagaaacatgaagaacataactcacctgccctgggtgaatattctggcaggtgccttggcctttttgtgcacttttagcaataatctgccaaaaggccactgagcctctatttaatttggtcatcagagcatcacatccaagatattcatcaaatctccaaatgtgactcatcaacagatcttctccctgtccgggctcagggctccttccgcccagaagcctcgatgggttgagagcctggttacctctcctgcttctgcaccttgcacttctcctcctcccagccctgctcactgccagtttctgacccatccagggttggagtgtagggaggaaaagggaggcagggaagtgccatgtggactgtggctggagctggctggctgctcgccgggctcttcaggggcttcctgcacaggcaggagacagatcccagtccgctcgctgctataaggatcacctaggggctgggcgcagtggttcatgcctgtaatcccagcactttgggaggccagggtgggtagatcacttgaggtcagtagttcaagaccagcctgaccaacatggcgaaaccctgtctctactaaaaatacaaaattagccaggcgttgtagcaggtgcctgtaatcccagctacttgggaggatgaggcaggagaattgcttgaccccgggaggcggaggttgtggtgagccgagattgtgccattgtactccagcctgagctacagagtgatactccatctcagaaaaaaaaaaaagagcattacctatggggtccctcctgctgcggggtggggaagggagagaatggggctcacccaccagctttctccacaagttccttttctctctccatagtttaaatagtgggaaatgtggtataagagcttgggggaacagagtcttcagatcattttctctttttttttgacacagggtctctctctgttgcccagcctggagtgcagtggcacattcttggctcactgcaacctccgcctcctagattcaagtgattctcctgcctcagcctcccgagtagctgggactacaggcctgtgccaccacacccagcctcattttctctttacgctctcctgagttgctatcagattttgatagcgcctccatcaaaacttcctgttacaatgaacttcctttattaattttttttcttctttaaacctcagcatctaccagaggaatgcaatgaattttcaaaataacctttgttaagatgacttacaaggtatacttgtgtaacacaagtgttcaaaagaactaaaactcataaacattctacatcagtcagctattcctacaataaagccgtataacaaaccacccaagggctcagtgacaaacgttaatgtttctttctggcttacaaaaaatacaaaattacccaggcgtggtggtgggcgcctgtaatcccagctactggggaggcagagacaggagaatcgcctgaacccaggagacagaggttgctgtgagccgagattgcgccactgccctgagggagtaggtttttgccaaactgtaagatctgccacacggtctatgtatttaaaacaggaataagtgaacagtccttggaggattaccctttgatgtcagaggatgttcagacatctgctttatagaaaatgtgtatgtgccctaacacttttttttttgagacagtctcgatctgtgccccaggctggagtgcagtggcgccatcttggctcactgcaacctccgcctcccaggttcacgccgttctcctgtctcagcctcccaagtagctgggactacaggcacccaccaccacgcccagctaatttttgtatttttagtacagacggggctttaccatattggtcaggctggtctcgaactcctgacctcaggtgatctgcccgcctcagcctcccaaagtgctgggattacaggtatgagccactgcgcccagccgactttttattagatttcgaatctggttagccagcaacttactaattagatgtggactttcattcttcagaaggaaactggccgcgtgtggtggctcacagctgtaatcccaacactttgggaagcccaggaggtaggatggcttgagcccaggagtttgagaccagcctgggcaacatagtgagacctcgtctctacaaaaaataaacaaaattggctgggcatggtggtataagcctgtagtcccagctacttgggaggctgaggcaggaggattgcttgaggacaggaggtcaaagctgcagtgcgctatgattgcaccattgcactccagcctgggtgacagagtgagacctgtctcgataaaacaaacaaacaaaaaaccctattcctattttttgatcgaatattttctctctgaagtgtcttagtgcctttcttcccaccatctaaataatctctccctccacagtatggctgtgacccgatccaaagacgctcctcctttcggcccccccatccccagtggaaccacattccgcaaatccgacgtcttcagagacttcttgctggccaaggtgattaacgctgagaacgccgcgcacaagtccgacaagttccacaccatggccaccaggacccgccaggagtatctcaaggacctggccgaaaactgtgtctccaacacccccatcgactccaccggcaaattcaacctcatctccctgacctccaagaagaaggaaaagacaaaagcacgggctggcgctgagcagcacagtgcaggggccatcgcctggagggtggtggcccaggactacgcccagggggtggaaatcgactgcattttgggaatttccaatgagtttgtggtgctcctggacttacgcaccaaggaggtggtgttcaactgctactgcggggatgtcattggctggactccagactcctccacactcaaaatcttctatggacgaggagaccacatcttcctacaggcgacagagggttctgtggaggacataagggagatagtgcagagactgaaggtaagggagagagcccggcgatagggcggcgatttgtatggtttcggcctcaggaaccactgaaatacttccctagcccagtcagttaggctaagacacgcactggcccggagagaatcacagttgtcacttacaaactagacatcttgtgggttctgtagctaggttcttcctctggaaggtttgtgccagagatctgtggatcttcatgctattaccttggaaagacaagagatacttattaaccttggacactgatagaaagtataaatttaagcttaggttaaaaatgtaggccaggcgccatggctcatacctgtaatctatctcagcactttaggaggctgaggtggtggatcgcttgagcccaggaatttccagaccaacctgggtaaccatagtgagactctgcctacaaaaaaaaaaaaaagaaaagaaaattagggaagcatggtggtacatgcctgtggtcccagctacttgggaggctgaggtgggaggattgtttgagcccaagaggttgaggccacagtgagctgagatgacgccactgcacttcagcctgggcaacagtatgagaccctgtctcaaaaacaaacaaaaaaaaagaagtgtaagagtactttctaaaataattaaaatagaatgaaaaatgtccaaaccattaatggatagggcagaggtgagaggaggaaaaaatacaagaaagcacaaaggaacataaaattacatggcaggaatgagttccatgttagtaatcacagtaaatgtgaatggtttaacttgccctattaaaagacaaagactcacagtctaggtagaaatcttcccctaaacccctcgtggacaaaccaagagtggcagattggtgatagcttagctgctgtctgcctgaagcattgtgctgagaagtactcaggccccatctaagctccacaagaaagaacactgtggtcagtgattgcctctgcagtgggtttggcagaacgccgtgccatgtgtgctaaatagagatagcatataacacggcagttcagagcacaagatctagtcagaaggcctggcttcaagtcccagcactgccacttaccagctgcatgaccttgagccaagttatttagcttctttgtgattcagtttcttcatctgaaaagcaggtacaagaatcattctgcattgctgggtgcagtggctcatgcctataatcccaacactttgggaggccgaggagaaaggattgcttgagcccaggagtttgagaccagcctgggcaatacagtgagatgccgtttctaaaaaaaaaataaaaaaataaattagccgaggcaggtagatcatgaggtcaggagatcaagaccatcctggctaatacggtgaaaccccatctctactaaaaatacaaaaaattagccaggcatggtggtgggcgcctgtagtcccggctacttgggaggctgaggcaggagaatggtgtgaacccggaaggcgaggcttgcagtgagctgagatcacgccactgcgctccagcctgggtgacagtgctagactctgtctcaaaaaataaaaataaaaaataggccgggcgtggtggctcacgcctgtaatcccagcactttgggaggccgaggtgggcagatcacaaggtcaggagattgagaccatcctggctaacacagtgaaaccccgtctctattaaaaatacaaaaattagccaggcatggtggcgggtgcctgtagtcccagctactcgggaggctgaggcaggagaatggcgtgaacctgggaggcggaggttgcagtgagccgagaccctgccactgcactccagcttgggtgacagagcgagactccgtctcaaaaaaaaataaataaacaaacaaaaaataaattagctgggcatggtggtgcacacttgtggcctcaactattcaggaggctgagtgggatgatcacttgagcccaggagtttgaggctgcagtgagctatgatcacaccactgcactcgaacctcggcaacagagaaagacccggactcaaaaaaaaaaatgaaaaagtggccaggcgcggtggctcacacctgtaatcccagcacttggggaggccgaggtggatggattatttcaggtcaggggttcaagaccagcctggccaacatggtaaaacctcatctctactaaaaatacaaaaattagccaggcgtggtggcacacacctgtaatcccagctactcgggaggccgagggaaaagaattgcttgaatccgagaggcagaggttgcagtgagctgagagtgagccactgcactccaacgtgggtgacagagcaaaactctgtctcaaaaaaacaaacaaaagcaaactcctgtgttcctccccacccctctcagaggtttcctgactttgtaaaatagaagtcctctactcaaataaggttttagggaaaaaaaggtcgactccatccctccatttgcggatgtcagagctttggcatcagcctgggctccactctctctcatgcccacattcgtcagctccacttctgtaggcaggcatcagccacctctcccagagccctcaccctggagcgagccaccctggtctctcccggacactttcgatggtgtcctttctggtccttcttacccctgcccttgcttctctgtggcctgttctcgacgtggtagtgagagcaatctgatcacatcacctctctgcctaaaccctcaggtcactctaggttaaagcctcagtccttacagaagcccatgaggccgggtgtgaactggctccctgtcgacttctctgacctcatgtcactgttgcgctctctgccccagccatgaagacctctgaggtttcatgcgcatgctagggcggcgtccagcctcagggcctttgtaccacctcttgctggaacacttctctgatcaccacatggctcgctccctttcctcctacaggcctttggtcacatgtcgccttgtcggtgaggcctcgttatctaagattgcacaccccctcccctggcttggagcacattcacgcgctttgcctgcttaaccaccatctgccatgcactgtgtgttatctgttcactgccgtgtcctcagcacctgggccagcatctggtgcacagtagccgctgagtgagcaggaaccgagtgcaggcacaaatgcgtcgtatgctatagtggccgcaatagtgaggatcaaatgggcgccagctctgcgtcagaccctgctcagcaccttgggtggtcttgcgtctcttgctcacaaaagcctgatgaggtcctcacttcgcagatgaggaaactgaggcccagagataccttgacttgcccagagcccaaagagcctgggttttggagttttttttttgttttttttgttttttttttaattgatcattcttgggtgtttctcacagagggggatttggcagggtcataggacaatagtggagggaaggtcagcagataaacaagtgaacaaaggtctctggttttcctaggcagaggaccctgcggccttccgcagtgtttgtgtccctgggtacttgagattagggagtggtgatgactcttaaggagcatgctgccttcaagcatctgtttaacaaagcacatcttgcaccgcccttaatccattaaccctgagtggacacagcacatgtttcagagagcacagggttgggggtaaggtcacagatcaacaggatcccaaggccgaagaatttttcttagtacagaacaaaatgaaaagtttcccatgtctatttctttctacacagacacggcaaccatccgatttctcaatcttttccccacctttcccccctttctattccacaaaaccgccattgtcatcatggcccgttctcaatgagctgatgggtacacctcccagacggggtggcggccgggcagaggggctcctcacttcccagtaggggtggccgggcagaggcgcccctcacctcccggacagggcggctggccgggcagaggggctcctcacttcccagtaggggcggccgggcagaggcgcccctcacctcccggacggggtggctggccgggcggggggccaacccccccccacctccctcccggacggggcggatggccgggcagaggggctcctcacctcccagtaggggcggctgggcagaggcgcccctcacctcccggacggggcggctggccgggcggggggctgaccccccacctccctcccggacggggtggctgccgggcggagacgctcctcacttcccagacggggtggttgctgggcggagggtctcctcacttctcagacggggcagctgccgggcggaggggctcctcacttctcagatggggcggttgccaggcggagggtctcctcacttctcagacggggcggccgggcagagacgctcctcacctcccagacggggtcgcggccaggcagaggcgctcctcacatcccagacggggtggcggggcagaggcgctccccacatctcagacgatgggcggccgggcagagacgttcctcacttcctagatgggatggcggccgggaagaggcgctcctcacttcctagatgggatggcagccgggcagagacgctcctcactttccagactgggcagccaggcagaggggctcctcacgtcccagacgatgggcggccaggcagagacgctcctcacttcccagacggggtggcggccgggcagaggctgcactcttggcactttgggaggccaaggcaggcggctgggaggtggaggttgtagcaagccgagatcacgccactgcactccagcctgggcaccattgagcactgagtgaaccagactccgtctgcaatcccggcacctcgggaggctgaggctggcggatcactcgcggttaggagctggagaccagcccggccatcacagcgaaaccccgtctccaccaaaaaaatacgaaaaccagtcaggtgtggcggcgcgcgcctgcaatcgcaggcactccgcaggctgaggcaggagaatcaggcagggaggttgcagtgagccgagatggcagcagtacagtccagcttcggctcgggatcagagggagactgtggaaagagagggagagggagaccgtggggagagggagagggagagggagctgttttgttttttgagatggagtcttgctctgtcccccaggctggagtgcagcagagcgatctcggctcactgcaacctccacctcccgggttcaagcatttctcctgtctcagccccccaggtagctgggactacaggcgcccgccaccatgctcagctaatttttgcctttttaatagagatagggtttcgccatgttggccaggctagtctcgaactcctggcctcaagtgatccaccctccctggcctcccaaagtgctagaattacaggcctgagccactgtgcccggccaagcctgggttcttaaacactaggctactccgcctcccctaatcttgacagcagctcgcgtttcttgagcagggaccatgccaggcaccatgccaggtgacatgttttacccacatcctcactgtgccactctgtcccacacccacccccgtgcctactgttggcggagtccttttggagcatatttccacagccatacccccacccccacccccagtctcagtgccccagagcctgctggggaaccagtgggccagggaatggtgacataagccatctcccgtggaggggcaggcccgttttgaatgacttgtgacagtgagtctctctctttgtgaagcacccacagggtacagattccacactctccccggcaggctgactcaactgccccagacatcctgaactaacggtatcccatcactggttaattgaatgagtgttgttatgcgcctggccttggcctggccagtgctgggacatagtgatgaccataacagacccaggcctactttcatggtgctcctctctgggacagatattaaacacgcaattcggccaagcgcggtggctcacgcctgtaatcccagcactttggaaggccgaggcgggtggatcaccaggtcaagagatcgagaccatcctggccaacatggtgaaaccccatctctactaaacatacgaaaaaattagccgggcgtggtggcgggctcctgtagtcccagctactcaggaggctgaggcagaagaatggcgtgaacccgggaggcggaggttgcagtgagccgagattgcaccactgcactccagcactccagcctggtgacagagtgaggctccatctcaaaaacaaaaacaaaaacaaaacaaaacaaaaaaaaacaccacgcaattgaagtgccaagagcttaaaaggggggtgtggaggatgccaggagaacctatcagatggtgctaaatcagacaaggagaaggtctcaaatccacaggttggatacagtcccagatgtatttagttagttaccacagtttaacatttagagcaagcttgtccaacctgcagcccaagagggctttgaatggcacccaacacagattcataaagtttcttaaaacattatgacattgtgagtttttttgtgatttttttaagcttatcagctatcattaatgttagtgtatttcatgtgaggcccaagacaattctttttttttttctttaagacagtctctctctgttgcctaggctggagtgccatggtgcaatctcagctcactgcaacctccgcctccccggttcaagcgattctcctgcctcagcctcccaagtagctgggattacagatgtgcaccaccatgcccagctaattttgtatttttagtagagacggggtttcaccatgttgcccaggccggtcttgaactcctgacctgaggtgatctgcccacctcagcctcccaaagtgctggaattgcaggcatgagccactgtgcccggcccaattttactttttaattatagaaaattgcaagcatacactaaagcaaagggaatcatataagaaccccagtcttggccggctgcagtggctcacacctgtaatcccagcactttgggaggccaaggcagttggatcaccagaggtcaggatttcgacaccagcctgaccgacatggagaaaccccgtctctactaaaaatacaaaattagctgggtgtggtggcgcatgcctgtgatcccagctacttgggaggctgaggcaggagaattgcttgaatccaggaagcggaggttgcgatgagccaagattgtgccattgcactccagcctgggcaacaagagcgaaactccgtctcaaaaaaaagagaaccccagtcttcattaccatctacaatagttactgacccatggctgatcttgttctttcttccttccctctctttcccaattattttgaagaaatcctagacatcttatcatttcatctgtaaatttttcaatatttatttctaaaagatacaactcttaaaacataacatagccatcatacataaaataaaaaattaacgataattccttattgtcaaataaacacattgtcacccatgagtgggctataaaatcaatcacagagatgtaattttttttatttttaattttaactttaatttttaaagacaaggtcttggtgtcaccccggctggagtgcagtggcacagtcatcgctcactgcagtgtcactctcctgggctcaagcctgcctcccacctcagcctcccaagtagctgggactgcaagcgtatgccaccatgctcagctaattttttttttattttatttttagtagagatgaagtcttgctatattgcccaggctcatcttgaactcctgggctcaagcagtcctcctgccttggcctcctaaaagtgttgagattacagagattacaggtgtgaggcactgcactcagcccgagttgcaacagtgttaaaggttagatatcttagtccacttagcctgaatataacaacatagcttaggtggggtagcttataagcaaaagcaatttatttcttcgcatttctggaggccaggaagtccaagataaaggtacccgcaggttctgtatctggtgagggcccctttcaacttcacggatggcaccttcttgctgtcatggtggaagaggtgaacaagttccttgggcctcttttttttttttttttttttttttttttgagacagtctcgctctgtcgcccaggctggagtgcagtagcgtgatctcggctcactgcaacctctgcctcctgtgttcaagcgattctcctgtgtcagccccctgagtagctgggattacaggcgtataccaccacgtcaggcctcttttatatgggcactgatccccttcatgagggttctgccgtagtaataggatgggaaagaataaaaagtgtcacagtgtgcctcagtgagtaaagataagactattttatgaagcattgttttggtcacacgtttcccccactttccaaattctcgccgtccaaatcaggaaccaaacagattcagtgacattttcaggtaagtactttaccatccaaatgcttacttcttgctatccacactcaagaatgtgacggatttgaattgcaaggaatatttgtgtctgtgggcatgtgtgtaaaacacgaatgtgtagagtagtttgtgacgtaaaattatttctaaaacacgaatttgtagagtagtttgtgacataaaattatttctttccttggccgggcgcagtggctcacgcctgtaatcccagcactttgggaggccgagacaggtgaatcacttgaggtcaggagttcgagaccagcctggccaacatggtaaaaccccatctctactaaaagtaccaaaattagctgggtgtggtggcagatgcctgtaatcccacctactcgggaggctgagacaggagaattgcttgaaccagggaggcggaggtggcagtgagctgagatcgggccactgcactccagcctgggcgacagcgagactccgtcttaaaaaaaaaaaaatttattcctttcttcaagtggtggtgagaaaagtatgaaagcgggcatcctgataggtatgttacatagcatcatttctagccaggggatgacttctcacaggaaatgtaagccattccgttatctttccataacgcagttttaggaaagggcaggcattcttgacaacttgcttaatagccatggctggttacattcatcttgtttttatcccaagaagaggggatcgcttaacagcatgctggggggagggggcagggctctattcagcaggtcctcagatcttatggtaacacattatccaggggaatatctcacccagtgaagcagggagtcctggaggccaggccctgcgtggtccgatcagctccatgttgggggaaggtctgaggaggagatggggaaagggtttcttcctccaagaatggtgtcacgaggccgggcatggtggctcacgcctgtaatcccagcactttgggaggccgaggcgggcagatcatgaggtcaggagttcgagaccagcctgaccaatatggtgaaaccccgtctctactaaaaatacaaaaaactagccgggcatggtggcgcgtgcctgtaatccctgctactggggaggctgaggcaggatacttgcttgaacccgggaggcggaggttgcagtgagccgagatcacgccactgcactccagcctgggcgacagagcgagactctgtctcaaaaaaaaaaaaaaagaatggtgtcacgaagtaaaagaatataatgtgagttcccaacctagaaaaggtcccagtacttctggtctcatgcttccttgtgtattttagttagagtcattgtgtcagtcaggatacagtattagtggcttaaagcaggtttggctgggtgtggtggctctcacctgtaatcctagcactttgggaggctgaggcaggtggatcatctgaggtcaggagttcaagactagcctggccaatatggcaaaaccctgtctctactaaaaatacaaaaattagccaggcgtggtagcagacgcttgtaatcccagctactcaggaggctgaggcaggagaatcgcttgaacccaggaagcagacgttgcagtgagctgagatcatgccgctgcacttcagcctgggcgacagagcaagtctccgtctcaaaaataaataaataataaaatgatgaaataaataccacagcccagaggacatggcagtgccactcgcaactctttggccaaaacaagtcccagggccccacccaaccacaagggagccaagaagtgcaatcccactgaccccaggaaggagggagttcggggcctttggagccacagctcatgactgccatggtctctgcaaggttagaagccacggggtcgcatatccacatttcccctccagaaatcaggaagccaggctgggaccgggtgcgtgttccccctgcgggtcccctgccatcacccgggaaggtattaatagatgggagttggcaggtttttggcttcaaagcggggaacgtgaccaggggtcttccagaggagctgacccaagcagcttctgaggctcgatcctgcctgtggcctgcaggtgatgaccagtggctgggagacggtggacatgacgcttcggcggaacgggctcgggcagctgggcttccacgtgaagtacgacggcacggtggccgaggttgaggactatgggttcgcctggcaggccggcctccggcagggcagccgactagtggagatctgcaaggtggccgtggtcacactgacccacgaccagatgatcgacctgctgcgcacctctgtcactgtgaaggtggtcatcatcccgccttttgaggacggcactccccggaggtaagggcctccacctttcagccaggtggtgggtggcagctcccagatcgctggcatgaggcctccctggcactgtcacttgaggtcccaatagaggggggataggcaggcccttctaggcaggaatagtggcaacagtgacaggacggggagggcacatctacagagcgcttactgtatgccagttattggtttagcccttcatacgtgcatgatcgcatttaatctccacagttgccctgtgaggggagagcctcattcttcccatttcctacatgaagcacaggatgttaatagttgcttgcctgtgggccccccacacttcattcatttgttcaaaatgtgtttattgagcccctactgtgtgcaagctctgttcaaagtgaccacaacaaagtgcctgctcccttgcggtttgtgttctacagggaaagacaggccgtgaagaaataggtgtgtcataccggatcaggtagtactaagtctcagaaggaaattaaagcagggtaatgaaggggctgcagcacgatgggagagctgcttacaaggcgggcagagaaggctccacgaggctccacagggaggcagccatgtggttttctggccagcgggctccagacaggagctggccagggcacagcctccccagtgtacatgggtgatgtgttcctggagtacggggaggcccatgtggctggagcagagcgagcaggagtgagagctgagagcaaaggacagagaggtgaccaggcaggcggtgtgggcttcatgggttttattccatgcttgggttttattccatgctcagtgggaagctggtaggtgacttatttattttgttttgttttttcttttgttgtttttgttttttgtttttttagatggagtctcgctctgtcgcccaggctgaagtgcagtggcgtgatctcaactcactgcaacctccacctcccgggttcaagcgattctcctgcctcagcctcccgagtagctgggactacaggcacgtgccaccacgcccagctaatttttgtatttttagtagacacggggtttcaccatgttgtccaggatggtctcaatctcttgtcctcgtgatccacgtgcctcggcctcccaaagtgctggagttaacaggcgtgagccactgcgtccagccaacagcaatttcgtagtgtcaactatctagactgggttcacacctgtaatcgtaacactctgggaggctgaggtgggaagatcacttgaggccaggagttcaagaccagcctggccaacacagtgagaccccgtctctgcatctctgcatctctgcctaaaggagaaaaaaaaaacagtgcagttgtagccccagctattttcaggctgaggtgggaaaatcacttgagcctaggaagttgaggctgcagggagccatgattgtgccactgcactccagcctgggcaacagagggagacctcatctctttgttttttaaacagttgttcatcagaattctcctattggccgggtgtggtggctcacacctgtaacctcagcacttcgggaggccgaggcgggcggatcaccaggcgggagttcaagaccagcctgaaccaggctggagtccaagaccagcctgaccaatgtggagaaacactgtctctactaaaaatacaaaattagctgggcgtggtggcgcatgcctgtaatcccagctactcgggaggctgaggcaggagaattgcttgaacccgggaggcagaggttgcggtgagctgagatcgtgccattgcactccagcctgggcaacaagaatgaagctacgtctcaaaaaaaaaaaaaaagaaaaaaagaattctcctattgcatttgattcatgtatctcttgaggctctttttttttttgctttgagacagagtcttgctctgtcacccaggctggagtgcagtggcgcaatcttggctcactgcaacctccgcctcctgggttccagcgattctcctgtgtcagcctcctgagtagctgggattacaggcatgtagcaccacacctggctaaatttcatatttttagtagagctggggtttcaccatgttggccaggctggtcttgaactcctgacttcaggtgttccacccacctcagccacccaaagtgctgggattacagatgtgagccaccgcgcctggccttttccttgcagtttattttggaaagaaaccaggtcacctgtccttagagcttcccccttcctggctttagctggcggcctccccatggtgtcctttagcctattgctccaccactggtattttctgtaaactagagtcaaagatggaagcttgcttaggccccaatgggatgtctttcggccgcagcactcctaggtatgcatctgtgagaaggcactgcgtgcctggtctccccctgcaagtgacactaggggcaagcagaggcttcagacagcggcacctggccatcaccacatgtcccctccagtcctgtttcacagcccagcagccactgctaggccctgcctagatccatcatttcatgacggtttgcagacgagtgccatcttcattctgtcattccttcttcatatattggctggaatgcttctaaaaagagctttctttcagtaaccgtttagttaccctgaggtataatttgtacagagaagacaagataaatacagttttcagaataatgagttggtccctagcaacctccagaagtgaccaatgagagagacgcaccatgttctcagctctggaaacagtgcacagaggacagccaaggccttggcctcatggagtgaggccccaatgggtcaggggagacaaacagtaaacaagtaaatgaatgagatgattttatatcacagagtggggaggcaggagagcatagcaggagaggcaggctgtctaggtttgaatcccagctcttccccttgttacctttgaccctagggaagtggccttaccaccctgtgcccggtttcctcatttgtaaaacaaggacaataacgtcctttccacaagagcgtttgtgaagttgaaggagatccaacttgtaaagcacgtaggacaggccagacccagtgaatttgtgactgtggagtgctggtggctctcagcacttttggaggccgaggccagaagatcacttgagcccagcagttcgagaccagcctaggcaacatagcaagacctcgccactacaacaaattttttttttttttgagactgagtttcactcttgttgcccagactgcagtgcagtggcatgatcttagctcactgcaagctccgcctcctgtgttcaagcgattcttctgcctcatcctcccgagtagctgggactacaggcatgcaccaccacacccagctaatttttgtatttttagcagagacggggtttcaccttattggccaggctggtctcaaactcctgacctcatgtgatctgcccgcctcgacctcccagagtgctaggattacaggcatgagccactgcacccagcccaaatttttaaaaatcagctaggtgtgatggcacatgcatgtagtctcagctactcagggtgagataggaggttgagactgcagtgagctgtgatcacaccactgcactcaagctttctcaaaaaaaaaaaaaaaaaaaaaaaagccaggcttggtggctcatgcctgtaatcccagcactttcggaggccaaggcgggtggatcatgaggtcaggagtttgagaccagcctggccaatatggtgaaaccccgtctctactaaaaatacaaaaattagccgggcatggtagcgtgcgcctgtagttccagctattcaggaggctgaggcagaagaatcacttgaacccaggaggcagagtttgcagtgagccgattgcaccactgcactccagcctggatgacagagcgagactctgtttcaggaaaaaaaaaaaaaaaaaaaaaaaaaggcacgtgggacagtacttggcctataggaggcgctcgagagacactggcaccaagatactggatgtgaggactgtaaagggcacataacccacattggatagggtggtccgggaaggcccgaaggtgagggcaaaggcccttagcttggagacagaccagaaagaggacctgcatggctgcagcagattcagccaagaggagggcacaagatggggtgacgatgagtgccatattcacatatgaccttgctgggctcacaccagggctggtgtgatctctgctttgtagacgagaaaaccgaggcccagagtgaacaagtcactttgcagagttgtacagctagtaagcagcaaagcaaaattcaaatccaggtcggcctgtctccattatactctgcagcctctgaaagccatcacgagctattaatacacgggcatgcgagtgatgtccccaccctcaccttcctgagtcgtgcttgctctctctccacttggtgggggacagttctgggcaggcctaaaccctgaacctgagggtgtggccacccctacccacatcccagatggctcaacctcaggactccagtcatgccccgggtgtctccggttcccagcccttttctcctgccaccttcctaccctgcccggagccacagcccagccacacctgcttagatctctgcaggggcaagtcaaggccagataaccccacaggcaagtgccctggtggctacgctcctcgaggaaggacatgcacccctctccacacactcccacgggtgcacacgataagccagcttgcgcatcgcatgactctcaccccaaacatgcaggtagggacaaactgaaaggcaaagaaaagtctgcagttctccagctttggggagacagggccagggagagtgcaaccagacagaggagttcttctccctgcccttttcaggaggaagacattccctcctgttccctttataaggcagctgctgaaacaggatctcccgtttgcaggggtgggcgtgggtcaggacttgggtggtttttgttgttcttcaaatgcagaggtgtgtagctgacctcatttgcagagctgatgacccaggctctgggctttctccagcctgttgatgcaaccctggctcaaatgtctgttgtagtgagctctgaggcgagcagtgaggacgggatagaagtgccctcgctgccaccagccaggccgcatggcttgcacgctgaccccatgctctcagacaccgaggagaatgcatggggtcttcctcctacccccaggccacaaggctggagttttgtttgggtttttttgtttgtttgttttagttttgtttttcttcttttttcagacgaagtttcactctctgtgcctaggctggagtgcagtggtgtgagatcacgccactgcattccagcctgggcaagagagtgagactgtctcaaaaaaaaaaaaaaaaaaaaaaagaagaatgcgtaagaaagtgggagcagtggttgcttctggtagttgaaactggaggatgggattgggagacagggatgcgtgttatatcattttaatccttaaaaaaaattcaagggccagacgcagtggctcacacctataatcccagcactttgggaggccgagggaggcggatcacctgagatcaggagttcaagaccagcctagacaacatggtgaaacccggtgtctactaaaaatacaaaatgtagccgggcatggtggcaggcgcctgtaatcccagctactcaagaggctgaggcaggagaatcacttgaacccgggaggtggagattgcagtgagccaagactgcgtcactacacaccaacaagggtgacacagcaagactccgtctcaaaaaaaaatttttttaatcaataaatgaagcaggccttctcaaatgttattgtgtatcagcatcatcacaggcagctcagtcaaatgcagatccttgggccctgcctcaggggattctgatgcgtgtaatctgggatggggcccaggaatcttcattatttgctgagctcctgataatttcgatgatgatcattttcagatcactggggaaggcgagagccgggaggagctggggcagaatcttttccagagccccaaggtggtttggttggatttcagaaagtggaagtgaggcttttgcttctgtttgtgggaaaagcaggtaaactgtccttagaatcagctggaggaggcaactgcatcagctctgatttgttaagcagttgtcatgtgcagactctgctaacgctcagagaatgctcacagccagccccatattacagattaggaaactgaggctctgagaagagaattcctcacccacacccatgtaggtgataacggggctagaatctggatcagccatctggccccgcagccctggtctgtacctctccatgctgcatgctgccttcatttttgttgttgttgttgttgtttttgagatggagtctcactctgttgcccaggctggagtgcagtggcatgatctcagctcactgcaacctccgcttcccaggttcaagcgatcctcctgcctcaacccccctagtagctgagattataggcacgtgccaccatgcctggctaatttttgtatttttagtagagatggggtttcaccatgttggccaagctggtctttaactcctgacctcaggtgatccacccgcctcggcctcccaaagtgctgggattacagatgtgagccactgcacctggcccatatttttttttttttaggagatggggtctagaactcctgggttcaagtgatcctctcgtctgttcctcccaaatgctgggattataggtgtgagccactgcacccagcccatgctgccttcaaagtgattgattaatattttcctctttatattttaattattatttagttattatttttttggacacaggatcttgctgtgttgcccaggctggccttgaactcctgggatcaagtgatcctcccaactcagactgagttgtgtgagtagctgggactgcccagctatgtttttctctttgaggtcgtacccagggactcttagcccaagatgaagccatcagtacctaagggaaaaggccaggcatggtggctcatgtctgtaatcccaacactttgggaggccgaggtggatgcatcacttgaggtcaggagtttgagaccagcctggccaacatggtgaaaccccatctctactaaaaacacaaaaattagccaggcatggtggcaggcacctgtagtcccagctactcaggaggctgaggcatgagaattgcttgaacccaataggcgaaggttgcagtgagccaggatcacgccactgcactctagcctgggcaacagagccagactctgtctcaaataaaaaaaaaaaataataaagtaactaaaggaaaagtcaaggacataagaaatctacccactggctcccaaaccactctacggtggggccattgtccatggtggttaaagttgtgggctttggagtcaacgtgctaaatatttaaatccaacttctacttcttactggctgtttcaccttggatgggttatttaacttctctgtgcctcggtttacttgtctttaaaaggtgatgtactgatcaggactctgcgtaccagcaacagaacagactgaaacatggcgccgcaaaagagagtcttcactggctcacgtagccgacaagactaggagatgggacagcatttaggcatagccatatccagggactcagacaccctcaccaggagtctctgtcccttgtttacctttccatgtttgctgtcattctcagtcagtctcttgcctccccctcccacagggggttttcgaaacagttccagaataggacgtggtgcctcatgcctgtaatcctagcactttgggaggccaaggtgggcggatcacctgaggtcaggagttcgagaccagcctggccaacatgatgaaaccccatctctactaaaaatacaaaagttagccaggcatggtggcacatgcctgtaatcccagctactcgggaggctgaggcaggagaatcgcttgaacctgggaggcagaggttgcagtgagccgagatcgcaccactgcactccagcctgggtgacagaacgagactctatctcaaaaaaaaaaaaaaaaaactgagtgtggtggctcacgcctgtaatcccaacactttgggaggccgaggaggacagattacttgaggtcaggcattcaagaccagcctgggcaacatggtgaaatgccatctctactaaaaatacaaaaattagctaggtgtggtggcacacacctgtagtcctagctactcaggaggctaaggcgcgagaatcgctgaaacctgggaggtggaggttgcagtgagccgagatctcaccattgcactccagcctgggtgacagagcaagactccatctcaaaaaaaacaaacaactgatgctcgttatctctcgttggccctgcttagagcacatgacaattctgtgctagtcatcgtgtcagggtgggtgcttggagaaagcttctaattggtcaggcctgggtcacatgctaatacctggagccaggaagtggggtcagccccacccagagcccatattaacaaagacctgttatcaggagagggggtgtggggagagacaccaggcaggcaggaatggcaggtgtgcactgcctggagacagtgatagtacctttccccacctctgcccgggcctggcatgtctacaggctctgatagacgttcatattgttattgttcctcacctggtgcctggtgagacattggcagctgccagtccaaagggacagccagaagacactgccaagtgtcagttccagccatggcgctaccgaggggtgcggtgtgtcgggccctgggtgccagagcgcatccacctctgtcttagtctgttttgtgctgctatgacagaatatatgagatcggataatggataaagaacagacatacatttctcacagttgtgggggctgcaggttcaagatccaggcactggcaggatagggcctggtctttctacttccatgatggggccttgaatgctgtgacctctggaggacaggaacgccacgtccaaatacagcagaagagaagaagagagagagtccactcccgcaagccctttctatagtggcattcatccattcatgagggctctgccctaagctcctcccactagtccccacctcccaacagtggcattgggggttaagtttccaacacgtgacttttgggggaacacacatccagaccatagcagcctctgaaccaccatatccaccagatcttttgctgggtggccatgaacggggtggctccagggaattcaggagacactcagaggatcagctcgatgggggtatgggcacttccaggctgaaggctcctctgagctcagctctcagctgccaggaggtggatttcatgagcatggctcggggacccctcccatgcagggctgcagtggcagtggagaatgccagcccagccggcggatctccccgcctcaagccaggagcaccatggtgcatgtgccagcctggtctagggggagtcacaggtctctctgcatctatttcaaggttgtagatttcatggcttttttttttttttttaaccaccccacaaagtaggtcacctgctcctcttccagctgcctttaagattctttggaacaaggcagttactgtcctttgattctgaggacatccgcctttctggccctgagtaccgctaaggggggccaggcaggtctgtcgaggacactggcggcctggcagccgtgtggcctgggtcaggtagaagcgaggggcgggaacagagaattcgagtgggaggagggaagaggagatgaggtggaaagggccaggcagtcggagtccctgtgttgggtcccgtcctggttgaagactctgagctggtaagtttcagaccattttaaggagtattcactcgacttttaaaataggccatccccagccgggcgcggtggctcactcctataatcccagcattttgggaggctgaggcgggtggataacctgaggtcaggagttcgagaccagcctggccaacatggtgaaactctttctctactaaaaatacaaaacttagccgggcgtagtggcgcttgcctgtagtcccagctactcaggaggctgaggcacgagaatcgcttgaacccaggaggcagaggttgcagtgagccaacatcatgccgctgtactccagcctgggcgacaaagcaagactctgtctcaaaaaaaaaaaaaaaaaaaaaaaaagccatcccggtttatattgggccaggaaaacccagcctagacagcaggcccacgtgttggtgggctggggcctttctgagtaatgcagtttttctccccaggggttggccggagacctacgacatgaatacctcggagcccaagacggagcaggaaagcatcactcctgggggccggcccccctaccgcagcaatgctccctggcagtggagcgggcccgcatcccataactctctaccagcctccaagtgggccactccaaccactcccggccatgcccagtccctgagccggcccctgaagcagacccccatagtccccttccgggagtcccagccactgcacagcaagaggtaagcacctgctggggggaccaatacttcccaacccccaccagcccacacccatcctccgcccctccctctcctcactatttcctccatcctcttcctcgcctcaagctttcgaccttccttcttatccttatgtctcccttgttcctccctccctccttcgtttcagctttcaccgttggcctcttgtctggggacccagtgctggggagctctgggttagaaatccattatactaagtagacgactgaagctctgctttttaggctgggcacggtggctcacgcctgtaatcccaacattttgggaggtcaaggcaggagcattgcttgaggccaggagttagagagcttgggcaacatagcagaaccctggctctataaaaaacatttattaaaaattagccaggtgtgatgcacacctgtggtcccagctgcccaagaggctgaggtgggaggatggcttgagcccagaagttggaggctgcagtgagctgtgattgcaccactgcactccagactgagcaataccttatctctgaaaaataaaataaaataaaactgttatttttaaggtgaagggactgataagcacaaaatttaggacagtgacttcttcctggaggaggcagggaaatgggaagtggggaagcccacaggtagatgttagcaccaccgttctagtcctggggttggctggtagcttcagggagtttgttttatgatgatgacaaatataacttaacagatactcttttgaagatattatatattaaaagataaaaagaaaattttccaaaaaatgaaggaatccaacttgcagagggacatcttgtccccagggggcagaggcgagaatggtcttgagcagcctgcagaagctgtgagttgcgggcagccgcagtggatccgggaagagggggcccaggagcatcccagcttctctcgccctgtgctcagcatcctccccttcatcctgagcagtgaatagcagaagggatgtggctgggcgggggaaagttcggttggtctgtctgtctgtccgtctgtccatccatctgtctgtccgtccatcctcccagggcaggggtaccctcctactcaccctctgcctccttcctcccctgtctccttctaggcctgtcagcttcccagaaaccccttacacagtatcaccagcaggggccgacagagtccctccctaccgacagccttctgggagcttctccacccccggttcggccacctacgtgagatacaagccatccccagaaaggtcagcctccctcaattcttttcatgttaagggatctgatgaaagctgtgcctccttcttccccagcaaatgcacacccccacaattctagttgccattttatggtgtttctggacccctgaaggtcctcagaggagccccatggggtggttatgtctcaagttttggagcaaaactgggccgggctgggcaggacccatcgttggctttccttgcagcagaattttgattgctgttctcttgacacctgtcaagcaagagcatccactatccagcacggccatgcatctaactctctccagccctaagcccctaggaccaggctgccagcattacccagttttcgagatctttcaggattcagttctgcccacttgcgtccatctgcaacctggcagcctgagagatctccccaaaccctccatggctccccaccagcctgagagatctccccaaaccctccatggctccccagtgccctcaggataaacttggcattcaaggcccttcaggctctggctccggctgagcttattccccagctgccttcagccctcgtgccctctgttcttcctctgcccccaggtccctgtctcaggggcagccacatcaatcctagtccttgggcctgagctgtggccctcatcctgtgaatgtccccttcctcctcctccttgcagtggtcctcctcctgagcatctctgtcacccaccctctcctcctttccctgttctcttgcccaggccaccacagtgggcttccagccttcatctcacctcccctggtctaccctccactcaacactcaacagccagagggatctttctgtgtcttttttttttttttttttttttgagaccactctgtcgccagactggagtgcagtggcgcaatctcagctcactgcaacctccacctcccgggttcaagtgattctcctgcctcagcctcccaagtagctgggactacaggctctcgccaccacgcccagctaatttttgtatttttagtagagacggattttcaccatgctggccagactggtctcaaactcctggcctcaagcgatccgcctgcctcagcttcccaaagtgctgggattacaagtgtgagcccgtgcacctggccagatctttctatacctgaacatgcctgtcccctgctccaaaccctcccaccactcccagagccctcaggacacagctttggcccctccctgtggccaccagggcccctgcgagtctcgtgcagtgccacactttagccacactggccactcccagcttcctagggggactgtctgtatttcagagccttgatggtgttccttccttggcctgaatatgcttcacactcctcgcccacactccccccatcctaccaactcaagcttctgtgcccctctccagaacccttctctggagctccctcttgaggcaaggcactgccccccaattcctgtgtatttcctgactgtggccttgagcactcttcatccttattagccagctaagagtgtgtgtgcttgcgcacgtgcatgtatgtgcacctgtaagagagcgagagagagacagagagggtaagcgtgctcttcaagacctcccatcacatagtacacagtccgacacatggctgatctttggtatatattggatgaaaggatggagtgagtgggtttgttaaaatgaaaccacctgccttaagaccagggatcaggccaccaaaccagtggttctcaatctttagcaggcattggaatcacccagaggaggacttgttaaaatacagattattgggcctgagccccaaatttctgacctggtaggttcggggtgctgcaccagggaccattctctgagagtcaccacagtcatccattgttagattctaagcctcttgttcaattggagaaacacgcccactgtttcttcttctagtagccaccattcagctttcattcagcaaagggtctcaagagctttctggcgtgccaggaggagtatttgagatactcaattacgagggggttctgtagtcagcccttgctgactgtgatggagaggatcgtaaaaaccatgtgcactctgatgagcactctaatagaggaagagggaacacagcccagcactggaggtctagactggctgcctggaggaggtgacatctgaacagaagtttgagggactaataggagtctgcgacagagaggagagaaaaagtcattccaaacagagtaaaggccacagatatgaacaagcaggatgctgtgaaacacaggagaatcagagaggaatcgggtgtgtgcgggacatggggtgtgggggcacccaggtgacagcaggggctgaggttggaaatggcagtcagagtgactcaccagtaacaaaggtggtggcagtggtgttaccgaaagctcttgggaactgttgttgttgttgttgttttctcctaaagtcttggtatctgcctttattattttaactttttattttgtaataattactgagtcacaggaagttgccaaaaaaaacatacaggtggccgggcacagtggttcacgcctgtaatccctgcactttgggaggccgagatcggtggatcatctgaggtcaggagttcgagaccagcctggccaacatgatgaaaccccgtctctactgaaaatacaaaaaattagctgggtgtggtggcacgcgcctgtaatcccagctactcaggaggctgaagcgagagaatcgtttgaacctggtaggtgcaggttgcagtgagccaagactgtggcactgcactccagcctgggcaacaggagcaaaaactccgtctcaaaaaaaaaaaaaaaaaaaagaatacagggaggtcttgtgaacctgaacccttcacgcagcctcccctattgttaacatcttgtatggttataacgcaatatcaaagcaagaggttgacatgggtacaggcctacagcttattcaaaattcaccagttatacatgcactcatttgtgtgtgtgtgtctgtagctctgtgcaattttatcacatgtgaagtgttgtgtaaccatcacgaggtgcctcatgctacccttttatagccacacccatctcttccccctgtgcctaacccctggcaaccattcaccattcatctgttctgaggctcttttttttttttggagacaaagtctcactctgtcagccaggctggagtgcaatggcacgatcatatagctcactgaagcctcactcttctgggcccaagcagtcctcccatctcagctttgcaattagctaggactgcaggcatgcaccgccacacccagccaatttttcttttctttcatagagacaaggtctcgctgtgttgctgagactgatcttgaagcccttgcctcaagccatcctcccacctggacatcccaaagtgctaggattacaggcgtgagccaccacacccaacctgtcttttaattattgttatttcatgatgaatgttagataaaaagaatcagatgtacgtatgcttcagaggttgtctttttcactcagcagaatgtccttaaggttcatccacgttgtcgcgagtctctagttcactcattatgctgtttattccgtggtctagatataccacagtttaaccactcacccatcaaaagacatttgggggagtgcatattcagggcactttgaatctatgctgctgggttgaaataaagttttttaaaatattaaaaatatattttaaaaagatttaaaaagacatttgggtagtttccgagttttggctattataaatattcatgcggtgaacatgtacattcaggcatacaggtttctgcatgaaaataagttttcatttctctgggataaatgcccaggagtacaattgcttaccgtatggtaagtccatttttagtttgaaaaggaactgccaaactgttttccagagtgtctgtatcattttacattcccaccagcagagcgtgagtgatccgggtctccacatcctcaccatttggcgttgtcactgtttttcattttagctacttttgataggtgtgcagtgatatctcactgtgattttaatttgcatgttcctaatggctaaggatattgaacaccttttcatgtcttatttgccacccctgtatcctcttcagtgaagtgcctgtgcgtgtcttttgtgcgtcttctaattgggtgtgatggtgttctgtgtctaagagttctttggacattctaaatacaagtcctttgtcagatatgcgatttgcaaatatttcctcccagcctttagtttgtcttttttacagggtctttcacagaacaaaagttttttattttattttttatttttatttatttatttattttgagacggagtcttgctctgttgcccaagccggagtgcagtggtgtcatctcggctccctgcaacttctgcctcccaggttcaagcgattctcatgcctcaacctcccatgaagctgggattacaggtacgcacaaccctcccagctaatttttgtatttttagtagagacagggtttcaccatgttggccaggctggtttcaaactcctgggctaaatcaagtgactctcctgccttggcctcccaaagtgctgggattataggcatgagccaccacacccagcctaagttttttattctgataaagcccaaattatcttttttttattattattttatggatcaggtttttggtgttgtctaagaactctgcttagtgctgggtcctgaagattttctcgtttttttttctggaagttttactcttttacatttaagtccatgatccattttgagatttgtttgttttaatttttgtgtaaggtgagaggtttaggttgaggttcctttattgcctatggttgtctgatttactccagtgctatttattgaaaaggttacccccactccactgtactgcttttgttccttaaggcaaaaatgggggagtgcagaattaattggatatccttgtgtggatctgtttctgggttccattgatctatacgtatgatctcagtgagtcctcccagcaactccttgaggtgggtagtttaattgccctcattttacagagggaaactacagctcagtgaggtgaatttgcttggctgaggtcactctgccaggacgtaacagagccaagatgagaacccgggactatggttccagagggctgaccctgacgtagaactttgggaggctgaggtgggaggattgcttgggcccgggctgtcaaggcttcagtgagccaggtgtgtgacattgcactccagcctgggtgacagagtgagactctgtcccaaaataattaattaattaagagggaaggggccgggctcggtggctcaagcctgtaatcccagcactttgggaggctgaggcgggtggatcatgaggtcaggagttcgagaccagcctggccaagatggtgaaaccccttctctactaaaaatacaaaagttagctgggtacggtggcaggcgcctgtagtcccagctactcgggaggctgaggcaggagaatcacttgaacccgggaggcggaggttgcagtgagctgagatcgcgccactgcactctagcctgggtgacagaacaagactccatctcaaaaaaaaaaaaaaagttgggggaaggaactggatcacttgcccacccctcaacccctggcaaggtcacattgcacctctgtggctgtgttaactgtgaggatttactcaagtcacgagacagagggctggctgccagagtggaatctgggcaagcaggaacggaggtgatggctgctggggtggcagccaacaaggctacatcatctgaccgtcattttgcccaggcatcctgtcattcacctgtctattgtttcatcggttgatgtgggagattgacagagcgggctggagctctctgcccggcgaggctcctgcccacagtcctgtctgttttggtgctttcctctgtggccaagagggaagctcaagccagcgtcccgtagcccaaccctgctccccgtaaggttcctccccagagtcagtacctccagcttctgcctggagacatctgaaaccatagctagtcagctcatcccaaaacaccaaaccctttataaagtgagttatcttccaagaagagataattactttaaaattactcagatgaggttaaagacagcaatttgatcttctcttctgccggggatgtttccccagagctgtgtgtgatgagatgctggaatgtcccgatttctaatcagtttgaccaaaattggacagtgatagacatggtctcaaatgggatatattcagcatcccaatgaatggtcaacataggtcagtttgcattgggataataaaaagtcttgttagttgggtggggcacagtggctcacacctgtaatcccagcactttgggaggccgaggtgggcaggtgcaagcagatcacttgaggccaggagtttgagaccagcctggccaatatggtgaaacctcatctctaataaaaatacaaaaattagcttggcaccttggcgtgtgcctgtcttcccttgggaggctgaggaaagagaatatcgcttgaaccctggaagtggaagttcgcgtcactgctgcactccagcctaagcaatagggcaagactccgtctcaaaaaaacaaaaaaagtcttgttaacaagagaagtacatggttggataaagtacgggttgtctgattggggaaagtagctgagagatgaaacaaggtaaaatatgcccaactaaagaggagggtctatgtattacgattaggtttagctgcatagtatacaaaatagtggttctgacaagattgtttctttccccacattgacgggaaaccaggccccccctccttgatgtattgctgtccttggccttttgcctcctggttcaaagtggctgttcaagctgtagccttgaggaggtggtgaggcaaaggcatccacagcacactcatgaggaagcttcgaggctggaagttatgtgtggcacctccacttttatctcattggccagagctgcaagggatcctgggacatgtagtctggtgatccagtctcattgctgccccagatacagttgggattctgttaccaaggaggaaggagaggctagtcatggggagcagcctgcagcatccgccactcagactttccgccctccccgggctcatcctagccatttttcctgagtgctgaggatttcacagcgactttttgggaaaactgagtaagtgcatcaacactccgaactccagcaaggatggagccacattttaccaggcagctagccaggtgtgaagtcagctagtaagatgaagattgcttatagtcaaagttgcttttgtaaaatccctttgattgctggaaactgggccctcagacattgagaaaagtaagaattcacgtttcgtacttcctgtgtttgggccctgttttcctttcctggaggtgtcagtggtcaaggtctggttgagggcagggaggatggtgtgttttttcctggcaagtgagtggagttgagttttcagagagtgcagtgccccttgaaacacctctctactgtgctcagggcattgaagccaggggattagggcagggtccctgtagagacagtcctggctttgagctggcagggtgaccctggataagtcagttacttcctctttggcatcttgggggatcctagtttatcacctcacctccccctaccagatcctcccaagttgaaaatacagatgccaggagccaaccagggaattgcaatatcaacactttttttttttttttttttttgaaatggagtcttgttctgttgtccaggctggagcgcagtggcacagtcttggctcactgcaaccgcaatctccgcctcccaggttcaattgattctcctgcctcagcctcccaagtagctgggatgtcacaggcacacaccaccacacctggctaatttttatatttttagtagagatggggttttgccatgttggccaggctggtctcgaactcctgagctctagtgatctgcctgcctcggcctcccaaagtgctgggattacaggcgtgagccaccacacctggctaatatcaacattattaatggaggctcagtaactcccccagagcacagggcctgtgtcagtgaggtgcttctggctgaagtaaccaaaatttggctcaaacattgtaggaatttgttatctcacagaaaaggaagctcaggagcagggcaggttccagggagggtgaacccagcatcttgaccacattatcaagggccagattccttctgcctcctctcttccaccatcagagtgggtcttacctgcagcctggtagcaacagggcagcagcagcttatgatgttaaatctggacccagcagcatctggagggcaaagagaggccatcttttcttgtcatccctcttaggagcaaggagatttcccagaagcctctgggcagacttaccccatttcagtcagacggtgctgggtaacagacacctgaaagtctccgtggcttaaatcagcaacgtttatttctcagcccctccgcagttccactgctggttggcagggacctctcaggacccaggctacccaggcagccagcaactccaagtcacttccctgacagctcagctatgagcgctggtcacatgactccattcagccagtctcaagggacctggaagtgtgtcctgccacctgcttggaagtggagaactggaatgttttgtgggcgtcttaataactcacctcccttcgtgtctcatcagccaaaattttgtcacaggcctgtctctgaaccaacctcagacagggagaagaccttctaccacaaccggctgtgatccaaggaggactggacgttaggaagtgtctacaagattcaccccatggttgtagacagggccactggggccgggcatggtggctcacatctgtagtcccagcgctttgggaagctgaagtaggcaaatcgcttgggcccaggagttcaagaccagcctgggcaacatggtgaaacccatctctacaaaaaaatactaaaaattagccgggcgtgtaacatgcagctatagtaccagctactcaggaggctgaagtgggaggatcgcttgagccgggaggcggaggttgcagtgagctgagattgtgccactgcactccagcctggttgacagagcaagaccccatctcaaaaaaaaaaaaaaaaaaaaaatagagaatgccactgggacaggagggcacagtgagagccttctaccaccacctcccttaaatcctagccttgcatgtgggtgtgcgaagctggcctccaggaggacctctgtctaggggataactttattccatccactccccaactctatgaggtagaaaatgttacctcgtgagctgggcgtggtagaacacacagagttctagcccatcagccaggtgtcccaagtcaccatgtgtcaggaatcaaacccctgcctaaacactggacatgacggggcatccttcagtcctgagaagaaggacctactgttatcgcctcttgacagctaaggaaactgaggctgtgggctaggaagtggctgcatctgtctaggcaagaggccatggtgagctttgaagccccagttgcccaactcagggcctgctgcacccatgaatgcttcccaacctgctgtctccatcagagcaaggcagcccgagagaggcctggggcagtagctgctggggacattcaccccatgtcacagccagaaaacaggacccctgagaggagcccaggggtagggctgtcggcccaagcggcctctgccccctccttcccttaggaacccgccttgccccgccgccaccagctccctggcaggcttcccaggcgagactctcatcccggacccgcagctaatagcacgtttccaggcttactcatccagccttcctaaccgctttctctcatccacagcggagcctcccgtgtgtctaaaacccactggcgagcaaggctcaggctcaggctcaggtggttttcgacataggctgatctttaaccctgggcacgttcttctcatcccctgcaggtacacggctgccccacaccccctgctatctcttgatccccacttcagccacgatgggacgtccagcggcgactcctcttccggcggcctgaccagccaggagagcaccatggaacgccagaagccaggtagggcccccaccagctgctgcgcccacccgcctgcctcactccgcaggacctcttacttagagcttgacaggcaacactccccctcttgtgagtgacggataaaacacaaaagaaagctgtaagcgccacatgtaagactagagagggcacctaggagagcagcggaaccagcaagcgagatccttatccgtccagacagggcatcggcaggtggcgtctgctcccgctgataaggccagagccggcgtgcagctgtgtgacatggagctgggagccaccagggaaggtagctgaaaaagattaagcattgagctctcaggagcaggactggctgcgtcccgtggcttttcattacataaaccctcctgtgttgttttcaacttttatggacatacggcacatgttaagagcccacatggccaggcggggtggctcacgcctataatcccagcactttgagaggccgaggtgggaggattacctgaggtcaggagtttaagaccagcctggccaacatgtggaaaccccatctctactaaaaatacaaaaattagccgggcatggtggcatgtacctgtaatcccggctacttgggaggctgaggcaggagaatcacttgaacctgggaggcagaggttgcagtgagctgaaatcgtgccactgcactccagcctgggtgacagagcaagattctgtctcaaaaaaaaaaaaaaaagaggccaggccaaggcgggcggataataatttgaggtcaggaattcaagaccagcctggccaacatggggaaaccctgtctctactaaaaatacaaaaattagccaggcgtggtggtacatgcctgtaatctcagctactcaggaggctgaggcaggagaattgcttgaacctgggaggcagaggttgcagtgagccgagatcgagtcactgcactccagcctgagcgacagagcaagactctgtctcagaaaaaaaaagaaaagagcctacatgatgaagacacagcctgataacctatcgcagagtggacacacccaggcaggaaatataacatggctagcctctccaaacccccattcccctcccagttagtacccccaaaggaaccctgtcctacttctcagcctgagctttgcctggttttgaatttcatagaatacagaatcacactgtgtctattttgtgtatgtgtgtctggtttctgtcactcagtgttacatttgtgacagccagccagtgaatgtacatggtatcgcagtatctgagtggtatcccccgttgtatgaataagccacaacttattgccacatcttggtgttgatagacatttgggttgtttgcagttgggctgcctagagcagtgttgctaggaacattcttgtgcctgtcttttgatgaacataggttcacatttctgtagggtatacacctaggagtgaaatttctaggtcatatttttaagttgattttattttatttatttatttatttattttttaaacggagtttcgctcttgtcacccaggctggagtgcaatggcacaatctcggctcaccgcaacctccaactcctgggttcaaacaattctcctgcttcagcctctcaagtagctgagactacagacatgcgccaccacacctggctaatttttgtatttttagtagagacggggtttcaccatcttggccaggctcgtctcgaactcctgaccttgtgatccacccgcctcagcctcccaaagtgatgggattacaggcgtgagccaccgcacccagctattttattttattattcattttttttttttttttgagacagagtcttactctgttgcccaagctggagtgcagtggcgtaatctcagctcgctgcaacctccgcctcccaggctcaagcgattctcctgcctcagcctcccaagtacctgggaccataggcatgagccaccactcctggctaattttgtatttttaatagagacagggtttcaacatgttgccaaggctggtcttgaactcctgacctcaagtgatccacccgcttcggcttcccaaagtgctgagattacaggtgtgagccaccacacagggctagtatgtttaactttataagaaggtgccaaactgtttcccaaaatgacaaagcatcttatactctgtctatcaacatgtgagagttctagttgctgcatgccctcaccagcctctgtgtttcattcattccggtgggcaggtggtgctaccacattatggttttattttatttattattttttaaaaacattttttacagagacaacgtcttgccatgttgcccaggctggtctcaaactcctgggctcaggtgatcctcctacctcagcctcccaaagtgctgggattacaggcgcgagccaccgcacccggctggctttgtaatttgaattctttatgtctgtaatttgcatttttctgaagactgctaagatttgagcatcttctcaatgtgtcttccccattattaatcatgttgtgaactactcagatgaatattttaaacataattccatagaacaaacttgtagcccctttgaagtctgagaaccagcagatgaatgggcgagatggattcagaaggaagcaaacaaatgagcaatgttagaaagcagtgacgtcagagtgggaggggtggagatgtcctcttagggagtgtctgagaatttccaggcagctgggagagctgaccccatcagcacaccagctcccccagatgctgtggggtacggaagaggctgcatgccccaagattcgtggcctggagaattcctcaatatctcagcccatggttctcttaaaccagagacagtgtcacgcctataatcccagcattttgggaggccgaggcaggccgatctcctgagatcaggagttcgagaccagcctggccaacttggcgaaaccccttctctactaaaaatacaaaaattaaccaggcgtgatggtgcatgcctataatcccagctactcaggaggctgaggcaggagaatcgcttgaacacgggaggcagaagttgcagtaagctgagatcgcgccgttccactccagcctgggtaacgagagagaaactctgtctcaaaaaaaacaaaaaccagagacagtggttgggcttcagggaagcaggtcgaactgctggggcctcagcctctttgctgtctccagggtgtgcgtggtttgctcctgtcctcagcacatttgatcatgtcactgcctgcaattctgtcatctttgctccaagacagatagatttggatcccttttttcctttttcctcagcaagttcagaaaaagagaaaagtgttgcttggctatttcattacacaccaaagtacaaaatggggaggaagtgtttcctgcatacaccatgggccccaaaaaagaaactcaccattgcccttcccttccctcttctgtcccctggagcttggctcccctctcacttccttgggaccttgttatagttgactcctaaaattgccgccgccatacacacacgcccacatggatcaggggaatctgtgtttagaaatcatcatgaggctgggcgcagtggctcacgcctgtaatcccagcactttgggaggccgaggcgggtggatcacttgaggtcaggagctcaagaccagcctgaccaacatgatgaaaccctatctgtaccaaaaatataaaaattagctgggtgtggtggcatgcacctgtaatcccagctactcaggaggctgaggcaggagaatcgcttgaacccgggagacagaggttgcagtgagctgagatcacgcattgcactcctgcctcggagacagagtgagactccatctaaaaaataaaaaaagaaatcattgtgaggtctacaatgtattcaagactcagaaaaaaggccagggacagtggctcacacctataattctagcactgtgggaggctgaggtgggaggattgcttgaggctaggagttcgaaaccagcgtgggcaacctagtgggactctgcctctacaaaaaataaaaaaatatagctaggtgtggcagtgcgcacctatggtcccagctgctcaagaggctgaggtggaaggatggcttgagcccgagagtttgaggctacagcaagccatgatccactacactccagcctggccgacagagcaacacctgtctcaataaaataaaaaaataaaaaaaagttggttcactaaagatggcaaggatcaggcttcgcagcagatgtgggggtttgcccagccccgatggagcgagccatcctaataacagctgtacagtttcgtggattgtccagtgtgcacactgcacatgccttcatgtttagtcgtctcaggaacacaacagggtgggcactgcgactgcccccggttagagaggaggacgatgaggcacagaaaggttgtcacttgtcccaggtcactgctggtgagcagcgtaatcaggatatgaacggagccctgttgggtcccagaacccctccataagctccacccacaacccctcacccacagagtgtgagcgtttcccaggcctcagagcacccaggttgggagggttgcctccatggtcaccggctgcccagagactgtgcctggcccagggttttagcatgctctcacgctgtcccctgcccagcatgtcaagtttggggtaggaaggccagcaggtcaccgagggctgatccagagaactaggggacaggatcagggcctgctgagggcagagctggggcaggagaatgcaggggcagccaggatggggaggaagctgccctttcacctgtgcatgcattcaactgatgatgccaccaggctgggcgccagggataccgggtgagccaggcaggcatgttttctgccttattggagctgaaagtctggtgggagaattggacaattacagggacacgatgatgataaaacattaacagtaatgccgagtatgaagtggaaactaggctgggcacggtgtctcatgtctgtaatcccagcactttcggaggccaaggcaggcggatcacttgaggtcaggagttcgagagcagcctggccaacatggtgaaaccccatctctactaaaaattagccaggcatagtggcgggcacctgtaatcccagcggctcgggaggctgaggcaggagaatcacttgaacccgggaggtggaggttgcagtgagccgagattgtgccactgcactccagcctgggcaacagagcagtctctgtctcaaaagaaaaaaaaagtggaaactgtcacagtgtgcagaaggagatttacagggtttggggggcatctctgagcaaatcacatttcaggtgaggttggaataatgcaaagaagtcagtggggatgagaacattccagggaaagtgaacagctagttggagaccctgaggtggtggcgatgaggcccatgtggtgagaactgagatcagggaggggacgggcagagtatgtggagcctcttgggccacggggaggcggttgtcctgtactgagagtgggacaggagccgcaggtctcagtcttctgtgcagaggaggggcaggatctgactcgggtgttcccaggagcccctggctacagattactgtcaggtggggtgggagcaggaccaggtggggacagaggtaggcggagatgcacgattctggatatagtattttaaaggcagcgttaaccaaatttcttgatgatgcctagttgtgggcatgagagaagtcaaggatgccacagggggtttggccacagcagctgaaaggagaagccatgaactgagcaggaaaactgtgggagatgcaggtttgggggaaggtacagcccttggcttggccttggccatgttcagtgagaggtgcctgatagatacccaagtggaggtgctgcagggcagccgagttcaagtgtcaagtcaggggcagaggtcagcccagaggtagagcactggagttgtccgttgtctgtggtttttgaggccggatgtgactgccatgggcttcgctctgtagaaatgtggtctcccagagtgactgcccacctcccggggagccagcaccttctgggtgtataaaaatgccccaaagaggaaaaccatcaatggaggcagagcaggtggacaaagaggccagcctccccactttctcgcatccatggttccccagtgaaagccacacacgcggtgacaccctcaactgagactagaccacatccagccaggccattctctgcagtggccctgagtgccctgcctggtcacccgggccaccttccccagcaggaacatgggcccaagagtaccctgggcttgcaccggaggtggcagtgtgattgcaagctcggggtcccacaggcctggtgggcagttctgagttgggcgtatgcttggtgtgtggcctcagcagtgacctcctccccctcagcctcaggtcccactcctgtagtggacatcctaggtgtctctccttccagggcagtttgtggggggtccagtgagataatgccggccaagcccacggcccatcattaggagaacaagagctcctgcccatcgggcactcactctccaccactgccagcattgccgttgttggtgaagccaagggaggaggcagggcttgacagcacaggtgctaaactaggccaatccgagccacacgtcctgcctggccctttcccactgtgcgaccttggaccagctgcttaacctctccgagtcttgttccacatctatcggagatgctcctgatacccacttcacagtggtactgggaggacgcagcagggtaatgtatgcagagtgcttaccatagcgcctgacacagaacacacgcttaatgggaattatcattatgttaatgatcttgaataccatagtgatcaaaagtcagctttggggttaaatcaccggcgttcagctcctcagttagtgcatttgtaatttccatagataatatctaaatgccctccactggggttggtcactttttatgtatgtctttatttattttattttttatttatttttttgagacggagtattgctctgttgcccaggatggagtgtaatggcgcgatctcggctcactgcagcctccacctcccaggttcaagcaattctcctacctcagcctcccgagtagctgggactacaggcatgtgccatcacacccagctaatttttttgtatttttaggagagacagggtttcaccatgttggtcaggctggtcctgaactcctgacctcaaatgatccccccatcttggcctcccaaagtgctgggattacaggcatgagccaccgcacctggccaatttttttttaaggtcagcaagatacttggtccaggcatactgactaggctggagaggttaaaccagttgacatccagagcagctgctactcttttttttttttttgagacggagtctcgcttagtctccaggctggagtgcaggggtgcgatctcggctcactgcagcctcctcctcccaggtccaagcgattcttctgcctcagcctcccaagtagctgggactacaggcgtgcaccaccacacccagctattttttgtattttttttagtagagacggggtttcaccatgttggacaggatggtctcaactcttgacctcgtgctctgcccgcctcggcctcccaaagtgctgggattacaggcgtgagccaccgcaccaggcctgacatccacagcagccactactcttaaacccgcttcacctttggaccagcaattccaccagtagcactctctgtcccacacacaatcccacgcttgctcaaagtcgcatgtagagggaaggccactgtagagggaagactgttcaagataacctaaatatccatcagtaggaaactggcaggtcattgatgtacattcacttagtgcaatactattagggtaacatcacattcaattatgtgaagacctatggtgaagatataaagagaaaagcaagtatagacatattacaaagtgaaaaattaagttgtaggacagtgtttattattattccatttttgttttttaaaaaagttgtgggccgggcacggtggctcacatctgtaatcccagcactttgggaggctgagatgggtggatcacgaggtcaggagttcgagaccagcctggccaagatggtgaaaccccgtctctactaaaaatacaaaaattagccgggcgtggtggccagtgcctgtaatcccagctactcaggaggctgaggcaggagaatcacttgacctgggaggcagaggttgcagtgagctgagatcacaccactgcgctctagcctgggtgacagagcaagactccgtctcaaaaaaaaaaaaaaaaaaaaactatgtacatacaaccaacaaaggattgctaccttgcatatgtaaagaactctactaaccaataagataaaagatagtttgggccgggtgcggtagctcacacctgtaatcccagcactttgggaggccgaggcaggtggatcacgaggtcaggagttcgagaccagcctggccaatatggtgaaaccctgtctccactaaaaatacaaaacaattagctgggcatggtggtgccacacctgtaatcccagctgcttgagaggctgagacaggagaatcacttgaaccctgggcagtggagggtgcagtgagctgagatcataccactgcactccagcctgagcgacagagcgagaccccatctcaaaaaagacagtcaagctcatagataaatgggtaaaggaggctaggcatggtggctcacgcctatcatcccagcactttgggaagctgaggcaggaggatcacttgaggccaggagttcaagaccaccctggatgctgtagcaagacctcaaaaaaaaaaaaaaaattagccaagcatggtgatgcacacctgtagtcctagctacttgggaggctgaggcgggaggatggcttcaacccaggagttcaaggttacagtgagctatgatcattccattgcactttagcctgggtgacagggagagagggaaatgggatattgcacggcttcagtgaggccctcagaacggtgtctggcacatagtatgtgctgagatgtattctctgttactgagtgttgcactccaaggtgtaaattgatggggtcatgccgtgggtgagcagacagtctggcaaagggtccagattcttcaggccctggcctgagtcactcctaaccactggtgtgtctcctgttttcctacagagcctttgtggcatgtgcctgcccaggccaggctctcagccatagccggaagcagcgggaacaagcacccgtccaggcaggatgcagcaggcaaagattcccccaacaggcattccaaagtgagtctgggccccaccctgccctaccgggggagccaggcctgcctgggtgtggcctctgagcttcacacttgagcacatcctcaacctctgccaccttccactcagcagaggggttgaatacttggtctgagttggaaccaaccaggttcacattctggctccagccctcatcagccaggtcatctagggcaaatccctttacctcctcgagccgcagtttcctcattgttccatcagtcatggtaaatcagctgctgtaacagacagccccgaatctcagtgacttcatacagtggaagtggatttccctctcctgtaacagcgcagtgcaggtattcagtgagcatctacccgccattcacgtggtgattcagagcccaggctccctccctcttgtggctctgctgtccctcagaggttccaagccctctgctgggtccctgcgtctttccagcagtggaggtgagtgggagaaaagatcacatgggaggtgttttttagcccaggcctggaaatggcatgaatcgcttccattccatcacgtggccacacctagctgcaagggaggctgggaaatgtagtcttgcatggcccaggaaggctggggatgtagtcctgtgtgtccaggaggaggagatggtttgcaggggctcttggcaatctctttgtatccattcgttcagtgggtgtttgacaagcgcttacaacactccaggcattgggaccatgatgatgaagaggacagaccagccctgtcctcaggaagctgacttcccatttggggcagcaagcagtaagcagataaacagatctgttgtataagaaaaagtgcgggctgggcgcggtggctcacgcctataatcccagtgctttaggaggccaaggcggacggatcacctgcagtcaggagttcgagaccagcctgggcaacctagtaaaaccccgtctctactaaaaatacaaaaattagccaggcgtggtggcaggaacctataatcccagctccttgggaggctgaggcacaagaattgcttgaacccaggaggcagaggctgcagtaagccaagattgcaccactgcactccagcctgagcgacagagtgagactctatctcaaaaaaaaaaaaaaaaaaaaaacagtccaggggagagagtgacaagcactgcagctcaaggatgatgtggtcagagagggcctttgagggggtgacctttgagcggaaaccttgagtgaaggaagggggaggcccacgaagatctctcagggaagagtattgcaggcagagggagcagcaggcgcagaggccctgacggggagtgcccagtatgttccgagaatagcaagggggccaccatggccacagcaacgtgatcgggagggaggggagatgaagttggagaccgggacccaagcatcaaagccccatgggccatgctgggaactctcacttgtgcctggagtaagatggagccacaggtgggggtcatcatctaactcaggtgttctcagccttctgctggctgcgtgtggggaataaacagggggatgagggtgcagagagaccagggaggaggctgctgcactggccccagggggaggacaggacaggcatggacaggaccacgcggagccgtggagcaggaagtgacaggtcccggatctgtgttgaggacgcgggcagcagggtttgctagtgggctggacatgagtgagagcaaaagcggggtcaaggtgagtccacggctcttggcaggggcagctgaaagcatggccggcgtcattgagatgaggaagacgctgccgaactcagtcttagattcgctgagtctgagatgtgggaagcatgttctgtgcctgatgtcatttgttcctctgagcagccccatgaggcaggcttactatcaccctccattttacagatgtggaaactgaggctgagggaaggtaaatcacttgcccaaggtaacacggccagtagatgagaagccaggatttgaagctgtctggtcccagggttcaggcccaggcagagggaggacccggcaagggaagatgcgcccctgccctggagtctgggaatgacacgcttctcttgcctctcagggagaacctcaatactcaagtcattccagcagcaacaccctctccagcaacgcatccagcagccacagcgacgaccgctggttcgaccccctggaccccctggagccagagcaagaccccctctccaagggtggctctagtgacagcggcatcgacaccaccctctacacctccagccctagctgcatgtccctggccaaggctccacggcccgccaagccacacaagccccctggaagtatgggcctttgtggcgggggtcgcgaggccgctgggaggtcccaccacgcagacaggcggcgggaggtctcccctgcccccgcagttgccggccaaagcaagggctaccgaccgaagctgtactcctccggctccagcacccccacgggactggcggggggcagccgagacccaccgaggcagcccaggtaagctgttgcacctagtctgggttctaaccaccttccacttcgccagttctacttttacggtcctgatggtggggttctcctccccagaaacacactcacggatgaatgcgcctagtcattggtttgctgacagaattgaggagctcgtggatctctgccttattgcccatccatcagcattcagggaccccaggtggagggaaagaaacccctggccttctgtctctgttttcatctgtctctggttctctctgaccctctgtctcttttttctttgctctctgctgataccaaaagtttttatgctttctaaagggtcacagactgtatctgatagagtgtatttggctggaggcaataggaaacctgaccctctgtggcttaaacaaatagaggtgtaacaaacagtcccctaacatgaagtccagagaaggcagagccaggctagtgctgtggcttgtggagagcctcaaggattggcactctgtgtctccctgctcggcatctttaccatgctggctcatgtctcacttgccttgagatggagctgtgctgcctggtgagtggcagttggggacagagaagaggggaaagttggaagcctctgagcacctttcccttcctatggagaaagcaaacactttcccagaacccctttcagcagctggcatcacggggccatcccagctacaaggaggtctggaaagttgtagtttggtcttccaggctctaccgtatacggcgatggtccccacagaagccctcaaaggcttgttcagcccagctgctggcccccacccagagtttctgattcaataggtcggagcgggagacctgagaacgtgcattggtgtttttttgtttgttttttagacggagtttcgttctattcaccaggccggagtgcagtggtgcggtctcaggctcactgcaccctctacctcccaggttcaagtgattctcctgcctcggcctcccgagtagctgagattacaggtgcccaccaccatgcccaactaatttttgtatttttagtagagacagggtttcaccatgtcggccaggctggtctcaaactcctgacctaaagggatcctcccacctcagcctcccaaattgctgggatcacaggtgtgagccaccatgcccggctgagaatatgcattaagttctcagtaaatgctgatgctgctggtcccaggaccacactttgagagccactggtagagaggcagacgggagtaagagagaaagagtaggcattggctggaaacggtggctcatacctgtaatcccagcactttgggaggccaaggcgggtggatcatgaggtcaggagatccagactgtcctggccaacatggtgaaaccccgtctctacttaaatacaaaaaaaaattagccaggcatggtagtgggcgcctgtagtcccagctacttgggaggctgaggcaggagaatcgcttgaacccaggaggcagaggttgcagtgagccgagatcgtgccactgcactccacccaggcgacagagcaagactctgtctcaaaaaaaaaaaaaagaaaagaaaagaaaagcaggaattggcgagccagcagcctagagtcccgaccacacacactgacgttcggatggaggcaatgagccaccttccagaaaagggcacagagatggaaagagtattctacacagacacagagctcagcctcatccttggacccccttagggttctgtgaccccagcagggcttgctgtgctgtagtgtccagtgccagcccctgagtccacagccccacatcccttcctgaccatgcctggggtgggctagcctgagtccccgatagccatcagggctcagaacctggttggcgcagggatcttcctctcctgtggcgccctaaagccttttccagtcctcaaaccccagcctctctccacacaggacacccacactcaggcagccaactcagacttctgaccacagtccacagtagaattgtgtccatctatacagaaatatctatgttaaaaaaaaaaaaaggtggctttgagcagtggctcacgcctgtaatcccagcactttgggaggccaaggcaagcggatcacaaggtcaagagctcgagaccgtcctggccaacatggtgaaaccccatctctactgaaaatacaaaaattagctgggcgtggtggtgggcacctgtagtcccagatactcgggaggctgaggcaggagaatcgcttgaatctgggaggcagaggttgcagtgagccaagatcatgccactgcactccagcctggcaacagagcgagattccatctcaaaaaaaaaaaaaaaaaggtgaagcagtggtttccaaaataattcttaacctgtgtgtgatatactttgatccagtctactctatttaaaaacttttaatgctgatcaatccccactcagatgatttcatggcttacagtgttctctgacagatatttgaaaaccactgtgtttgagtgattgtagtgtcagcacttccccgggcacactgtgatccaagggtctccttgagtcaaagagccaggagaagggctgaaggaggaaagaggagacagacagagagagacactgtctgagtgttttagacctctcagttcatctccctagacaagtggctgtttgttttttagaaacagggtcctgctctattgcccaggctggggtgcagtagtacgaccatagctcacgatagcctcgaactcctcagctcaagtgttcctcccacctcagccccctaagtagctgagactacaggtgtgtgcccccatgcccagctaattttttaagtttgttagtagagaaggggtctcactgtgttgccaaggttggtctcgaactcctgggctcaagcgatgctcccatctcggcctctcaaaatgctgggattacaggcatgagctaccacacctggtgacgagtacctcttaatcttttgaacatgtggactcttttgaatggctctttcattcatttattcattcactccattcataagtatttcttagggatttgctcggtcccagacactgtgctgggagctgagagaaatcaggagcacatttggatgaggcctccccaccgcccactgtcaaatgagggaagcagatgagaatcagataatcactgagacaaatgaatacgtgtgcgctcccaggccgggcacggtggctcacgcctataaacccagcactttgggaggccgaggtgggcggatcacctgaggtcaggagttcgagaccagcctggcccacatgatgaaactccgtctctactaaaaatacaaaaattagccaggcatggtggtgggcgcctgtaatcccagctactcgggaggctgaggcaggagaatcccttgaacctgggaggtggagggtacagtgagccaagactgcaccactacactccagcctggggaatagaatgagactccatcttaaaaaacaaaaacaaaaacaaaacaaaacaaaaatacattgcactccagcctgggtgacggagtgaaactctgtctcaaaaaaataaaaaataaaaataaaacactgtggaaaaaaaaacaaaaacctgtgccacgaagagggacatgaagccaagagagtctataccaggggcctcaggtctcgattgcagtagcccccattccaggcatgggaccaccaccttagcgaacccgaacaactgggaggatttgaaatccgagacataaagacagccaggcctggagtagactgtggctgagatgggagggtgggtatgaaataaccctgtgtctaaggaaaggatctgctgaacccagaaatgaaggcaatgaaatgggagaggagcccgctgcagaagagggccctgcggttgggagctttaatttgcatacagacaattgatgctaattgcaaatcattcttatctgctcattaaagctgcttcctgaagttttctcctaggcaaccaggcttgagtgtggcacagcatttcccaaaatggggtgcttgaggtgatttgggtggtgcggggaggaaaatgttttattttaaatggatatatgcttgctttcatgagtattaggaaaaagagtttgcaactcaccccctgattttacagataccaccttggacaagttaaggagaaaataaaatgagttgatttaaaaaaacatatccaggcccggcgcagtggctcacgcctgtaatcccaacactctgggaggccaaggcaggtggatcacttgaggccaggagttcgagaccagcctgaccaacacggtgaaaccccatctctactgaaaatacaaaaattagccaggcgtggtggtgcacgcctgtggtcccagctattctggaggctgaggcgggagaatcgcttgagtctgggaggcagaggttgcagtgagccgagatcacgccattgcacttcagccttggcaacagagtgagactcagtctcaaaaaaaaaaaaatccatgtggataagagtgtggcctttagtgtcagcccacctgcattcaatccctccctcagcgacttcttggctgtgtacccccaggcaagtaactgaacctctctgggcctcagtttcctcatctgtgaaactagggataaaccacatacctacatcatagggatgtggtaaagattgaatgtacccttagaacagtgctttgacttgaagactgcctgtcagaatcatggggtatgagggtgtatttgaaaaacacacagaaatgaggccttgcctcaaattcacgaaatcagaatatcccccctggtccaagacctgttacaggcagtgctggggacacagcggtgactgggggagccccagtcctgcctgactgacgcattcccagacagagacagcccagaggggtcaggtcaagatgggcgaggcccaggcagaggggtcagggtcagggtggggggcccaggctaaggggtcagggctgggatacaaggcagctgcgaagaggggtcagggtaagatgaggggcccaggtagaggggccagggtgagatgaggggcccaggtagaggggccagggtaagatgaggggcccaggtagaggggccagggtgggctggaggggggccaggcagaggggttggggccatgatggaggggtacagggatgtgagagcccaaagggggcccccctaacccagttgtgagaggggccagcccagttgtgggaggggctttcctggagaaagagtctgagctagccagggaagtcaggagggaaaagcagtccagacagagaatgagacggactcccactgtccatctcaccccacctcactccattggcctcccacagtcttcccatttcagtaggcacaagttccctggatggtcacagagccacctgcttggggccagaccttggttcaagtggccacacgtgcctctgcctcccatggcggccacactgcactgtgcaccgggcagcccagcagcccccctcatgtgctgtcgtcagaacgtgcccctgggctggagtgacagcctgctccccagcctctgctcctggaaggcaggcacctttgaacaggcccagcatgagcactcattgactgccctatgtctacctccacagcactctgtggcatagaacttggtatttattcacacagcgagcgcctgctgtgcaccggggcctctgcagggagctggaacaggcagaccagatccccaccgtcctggtacggacggaggcccatgggaaacagctagtgaataatgccaaaagtcatgaatgaattgtgccaggggacagcctgcagagacgggtggggtctgagggtggatgggatgcagagctggaggaggtgtctaatctagcctagggccagcgataatgttcctgaacgagggtcacatctgccaaggatgagggggacagggaggagggagcgggtgaaggaggagaggggttcagtggggctggagagacattcatctgggatgcagttatacaggtatttgctctgtttttgaaattgtgtgtatatatgcaacatatatatagacacacacactttctgggcctcaatatatgttgtgaacctcagtatgtatatatacaactatgtatatatacacacatatgtttttttttaagtctgttgaatttctcattcagaagaatgtatatatgactatttaccattaacaaaaaaacagaagggaaagatgaggcgtggagaaagtatgtctatgaattagagttgcgtgtgcaaagtccctgtggtagggaggagggtggtatcgtcaggccactgaacacaggcccttgggctcaagtatagaaattgtggctgggcacagtggctcatgcctgtaatcccagcactttgggaggccaaggcaggagcatcacttgaggccaggagtttgagaccagcctgggcaacatagacccatctctatccccctaccaaaacttttttttttttttttttttttttgagatggagtttcgctcttgttgcccaggctgcagtgcaatggcacagtctcagctcactgcaacctctgcctcccaggttcaagcgattctcctgcctcagcctcccgagtagctgggattacaggcacctgccaccacgcccggctaatttttgtatttatagtagagacagggtttcaccatgttggccaggctggtctcgaactcctgacctcgggtgacccacccaccttggcctcccaaagtgctgagattacaggcatgagccaccatgcctggccaaaaatttttttaaattagctgggtatggcagtaggctcctgcagtcccagctactcaagaggctgaggtgagaggatcacttgagcctggaagttcgagacagcagtgtgctgtgattgcaccactgcactccatcctgggtaactgattgacaccctgttgatcaatcaatcactccatcctgggtgacagagcaaggccctggaggtaggtaggtaggtaggcaggtagggcagccaatgggaggttggggaaatcagcagtggccagaacattcagggccctaccagctccattatggagtttggatctcatcttaagagcagccagggtaatgcgggtggatttgtgttccaaaatatggtgctggcagcgagacaggaggcaaagtctctgagggggctgaggcttggatctgcatgggaggacgtgggcctgagctggaggacaaagcaactgtggatgtggcagcaggcggcattgccaggaagtaagctgggagggagatgcaggcccagggcagagccagcaagccatgtgagagtccagggtggctgccacgtgtctggaggctgccgtggcctgggagcacctgaggtgcttgtgagaagaggaggcagagtggggcagccagcggggactgattcttccagtcactgacctttgcagcccctactctgtgccaggtgtcgcagcatccttcccttatggagctgtcattctcctggagacaggacaagacagacagacagccgaaccaccgtggagtgtgccaggaggtgataagtgctggggaggaaaggcaaaaacagcgggtctctgggaaggcttctcaggaggtgatgcgttgtaggaagccagggtgagatccaggcagtggaaacagtagatgactagaccctgagggtgaacttactctcaatgctccagaaatggtcaggtggccagaggggctgaagcaggtgggatggggggagagtggcaggaggtcagcatagtgaggtggcaggagcctggttctagcgggcatattgaccaaagtcagatgctgggatttggttccaagggacatgggagccatgggaggcatttgagcacatcatctgacttaatgtttttaaaaagattactgtgggctggacgtagtggctcacacctgtaatcccagcactttgggaggctaaggcaggtggatcacttgagcccaggagttcaagaccagcctgagcaacatggcaaaaccccatgtctacaaaaaattagctgggtgtggtggcacacgcatgttgtcccagctacttgggaggctgaggttggaggattgcttgaccccgggaagtggaggctgcagtgagccgagatcacatcactgcactcagcctgggtgacaaagtaagaccttatctcaaaaaatgataataataaaatgtaaaaatgaaaaaatagaaaagatcactgtgggctactctggagaggacggactatcttgggcagggggaggatggtggtcagcattcaaaggctgccaggagagggatgggtcctgacacgcccaagcggggagccccctaccctcccttccccgggctgcggcccttgccgtggaagcaggtgcagcctgtagcagcttgtgcccatcgatgacctcacagatgctccctccagacattcgtcatgggagcccagctgccaggcatgctgccaggcgccagtgcctgccatgggcaccgcagtgggctgagtgatcctgggcgggcagccacctggccctcgccctctcctgaggcagcacgcactccagagctttctgggcttccagagcaatttgtcagagctgttaggagcagtcataggctctcggctccacatggagctgacgcagccgggcgttcccaggcaggcaggaagcacgtggccttgcttccccaggctgcgccaggagtccctgggatgcccttctggggacacagccctgaaaggtaatctgagggcctgaagatccaccggggcccaccctgcctgtgagtgttgggaggctggggtcacctgagacagagacctcctcggagagtcacagcttgggaagaggaagcgaggccgtctcctggaactcaagggagtgcggaagccaggcagagatctgcagggcggggagcagtgcaaaggtcccaaggtagcagtgtttctgatgtgtttgaggaacagcttccgcatggctggagcagagtgaaggagagggagtgtggaggagctgggggcagagaagagaggggggcagatggggggccctgtcgggagggctctgggtcttacccagagtgaggtggaaccctgagagagtcctgatctgattcacatgttcccaggatctctctggctgtgtgctgaggctggggaaggatgcaggaggaagagggagccaggaggaggccgctctgacaatacaggtggcagtggttggtggaggtagcgagcagtggcttgattggtatctctgttgaatctcttgcctagaccctctctgtgtctgcttcctgaagacccgtcgcttctgccccacaggccacaggggcaatgtggctgcttacggctcctacactggagcacaattccagccgcatgcagggatgaattggttctccagcccatgacacacgtcagggagagaaagcaagattggtccagggtgaaggccaagtggctgggggccctcggggtatgtgggtgagcagtgtgacttcagggctcttcctctgactgcctatgtctacatcacagctccacctcttaccccaactgcgtgatctctctcaggccccttaggtgctctgaggctcaatgtcctcatctgtaaaatgggggtaataggatctgtcaaccagacacggtggctcgcctctcatcccagcactttgggaggccgaggcgggcggatcacctgaggtcaggagtttgagaccagcctggccaacatgatgaaaccccgcctctactaaaaatacaaaaattagccaggtgtggtggcgggtgccagtagtcccagagactcgagaggctgaggcgagagaatcacttgattgcagtgagctgagatggcaccactggactccagcctgggtgacagaactagactctttctcaaaaaaaaaaaaaaggatcctccatctaaagttgtgagggcgaactgagaccatgagtttaaagcacttatcacaggactggagacatagctgggctcaagtgtatcagctgctgctgtgttttattctcatgtattatgtattgatatttatcgttaacagttgttgtcactgggagtacagaatggtggttaaaatatcgtctctcaaaccagactacctatgtctacatcctggctcttatcccccactagctacatcatttcgggcaagttatttcatctccctgggcctcagtttcccccacctggaacatggaggtggtggtagttcctgtctcggggttgctacggcggctaagtgaggtgacgcctataagatgcttagaacaaggccaggcagcttccacaggctcagagtggtcagcactgtcactgccacctactgtgccactgctcctcctggaggcagggaccacagctcgctccctgagagcctgtcacccacccaggaccacccattggtccccttcagagtccccaggctgaacagaccaaaagcattgcacacacttatgcagctggtatgatttctctacccagcctctggtttttcagctttttttggaagcataaatcctttgactccaacaaaatgttaaatgctcccctaagatgtcaagcaggttaatgcatagctctctggttgaaggtgaggatggaagcacagagcacgttgcctgcccctcccccgctaccaccagtgctgtctgagcccagagcccagggacccaccacctccctggcacctgcagctccgcggttcctcctcaggactcagtgctgagcacttagcacataggatctcgtgaggcaggtgctgtcattgcctcatttctcagaggaggaaactgaggctcactgaggggaatagaccccacgcaagttggccactgtgttgatgggagccaggattggaactgggtcaggtggacagcaaagcccacactatgctgccccagttttcaagttgatattgagacttcaggaggacgcatgggcacactggcgctccagaaagaaagaacgttcaggctgggcgctgtggctcacgcctgtaatcccagcactttgggaggccgaggcgggcggatcatgaggtcagaagttcaagaccagcctgaccaacatgatgaaaccccgtctctactaaaaaatacaaaaattagccaggcataatggtgggtacctgtaatcccatctacttaggaggttgaggcaggagaatcacttgagcctcctgagtagctgggattacaggtgcacaccgtcacacttggctaattttttttttttttcaagtacagatggggtttcgccatgttggccaggctggtctcaaactcctgacctcgggtgatccattcgcctcagcctcccaaagtattgggattacaggcgtaagccactgcacccggctggccacttactttttaccctgtgccatttatgtagtttaattagactttttttagggttggttttttttttgttttttttatttgcttgttttttgttttttttgagtgatggggactctgtcacccaagctggaatccaatggtgcagtcatgcctcactgcagcctcaaactcctgggttcaagcgattctcccacctcagcgtcccaagtagctgggactacaggcatatgccactatgcccagcttaatttgacttttattccgtacatgttccccatcattactactttcagagagaatccattagtgtacactcctccagagatttttctctaaacctttaccaacccagttctttcaaacataccacttaggccaggcatggaggcttacacctgtaatcccagcactttgggaggtcaaggcaggtggatcacctgaggtcagcagttcaagaccagcctgaccaatatggagaaaccccatctctactaaaaatacaaaattagctgggtgtggtggcacatgcctgtaatcccagctactcgagaggctgaggcaggagaatcgcttgaacctgggaggcggaggttgcagtgagccaagatcatgccattgcactccagcctgggcgacaagagtgaaactccgtctcaaaaaaacaaacaaacaacaaaaaaacaaacaaacaaacaaaaaacatgccacttaacccttaccttgcaagaaatacagtgactttttaaaaattctagtttagctgggccgggcgcggtggctcactcctgtaatcctagcactttgggaggccaaggtgggcagatcatgaggtcaggagatcgagaccaccctggctaacacggtgaaaccccatctctaccaaaaatagaaaaaactagccaggtgtggtggtgggcgcctgtagtcccagctactcaggaggctgaggcaggagaatgacgtgaacctgggaagcggaggttgcagtgagctgagactgcgccactgcactccagcctgggtgacagagcaagactccatctcaaaaaaaaaaaaaaaaattctagtttattttgccaggcgcagtgactcatgcctgtaatcccagctctcagagaggcagaggcaggaggatagcttgagcacaggagttcgagacctgcctgggcaatttagtgagaccccattccccacaaaaagggggaaaaaaggacaaaaaaaagtataaaattctactttatttctttttttctctatacatatgtgtgtatatctatctatatattttttcccttaaatacacagaatcatgttttataccatgcatcgtttccatttactatagttcagaccatctgtcctcatacataaacagagattgacctttgcactggctgcatagtttttgatcataaggatatgcttgcggcagggcgcagtggctcatgcctgtgatcccagcaccttgggaggtcgaggcaggtggatcacttgaggccagaagttcaagaccagcctagccaacatggtgaaaccccgtctctactaaaaatacaaaaattatccaggcatggtggtgaatgcctataatcccagctactcaggaggctgaggcacaagaatcgcttgaaccccggaggcgcagaggttgcagcgagccgagatcacaccactgcactccagcctggccatttccaacttttcctgattataaacagtactacagagaccgtcctcatacctgcctgtgtgtgcttgtgcaggcttttggtgtgtgtgtgtgtgtgtgtgtgtgtgtgtgtgtgtgtgtgtgtgtgtgtgttttgtagctaagactatgggactatgggcatgtgctattattcctggctatttttatttttttgtggaggcagggtctctagggctgggcatggtgcctcacaactgtaatcctagcactttgggaggctggggtgggaggatcatttgagccccggagttcaagaccagcctgggcaacatagcaagaccccgtccctagatagagtctctacagcaactcctgggctccagcagttctcccacctaagcctcccagagtgctgggattacagcatgagccaccatgcccggccttgtgcaggcttttctattgcatggatttctgggaggccaaatgtcttgtttttgtttttgagatggagtctcactctgtcgcccaggctggagtgcaatggtgcgatctcggctcactgcaacctccgcctcccagattcatgccattctcctgcttcagcctcccgagtagctgggactacaggcgcccaccaccatgcccagctaatttttttgtatttttagtagagacagggtttcactgtgttagccaggatggtctcgatctcctgacctcatgatctgcccgtcttggcctcccaaagtgccgggattacaggcatgagctaccacacccagccaggccaaatgttaagctgaagccagtcatccttcagttctcagttctgatgctcttgtctcctggggaaagcattcctgaccattcttggtgttacatgcttcagtagttccctggacatctcctcaccaatgcctactctttgctccattgatagatgttgctaaattgtggaaagcattacatagttgctgtttcaatccagtcggacaatccctgccttttgatgggagtgttcagaccattcacgttaaatgtaattattactgctaatggttggatttgcattagccattttgctattgtttctgtatgtctactatctttcttgctcctctgttcttccttactgccttatactgtagtaaataaatacagtttcaggccggatgtggtggcttacacctgtaaaatcccagcactttgggaggcccaggcgggcagatcacctgaagtcaggagttcgagaccagcctggccagcatggcaaaaccctgtctctactaaaaatacaaaaattagctgggcgtggtggcatgcacccgtaatcccagctactcaggaggctgaggcaggagaatcgcttgagccagggaggcggaggttgcagtgggccaaggttgcaccactgccctccagcctaagtgacagagtaagactctgtctcaaaagttaaaaataaaaaatatatataatttagtataacatttggattctactcttgtgtaactatctttttagttattataatgtgcgtctatcactgcaattcaggttaatactaaattccaataaaatataaaacttttctccaatattgtcctatttccttctcccttttttgtgctctgtttatcataaacatccatatgtgttttaacccagcagtatagtattgtcattattgccttatacagtcttatgtctttaaggaagttaagagaagaaataagaaagcatatacttttatagaatcttattttaaaccacagtttgccatcttgggctattcatttctgtctactgactcaggtcattgtctagagtcatttctttcagcctgaggactttttttttctttttttttagatggagtctcactctgtcacccaggctagagtgcagtggcgcaatctcagctcactgcaacctctgcctcctgggtttaagcagttctcctgcctcagcctcctgagtagctgagattacaggtgcccgccaccactcagttaatttttgtatttttagtagagatggggtttcaccatattggccaggctgcgagctctcctgacaggcgatccacctgccttggcttctcaaagtgctgggattaacccgaggagttttaaaattattttgtatcaggcaggtgtgctagcaacaaattctctccatctctgtttatataggaacatctttctgttgccttcatttttcaaggatggttttgctgggtatagaattcctggttaacagttgttttctttcagcactttaaaagttacattttatttcattcttttaaatgagaagtcagcaattaattgtgtttttttttcttttttatagaagtggggtctcactgtgtttcccaggctggtttccaactcctgggcttgagtgatcttcccgtcttggcctcccaaagtgctgggattataggcctgctaattgtattgatgctcctctatatgcgatgcatcatctttttcttgatgctttcaagatgtttatcttagcatttttctttttttcttttctttttttttttttttttgagacaatttcactctttttgcccaggttggagtgcaacggcataatggcgtgatctcggctcaccgcgacctccgcctcccgggttcaagcgattctcctgcttcagcctcccaagtaactgggattatatggatgcgccaccacacctggctaatttttttgtattttagtagagatgtagtttctccatgttggtcaggctggtctcgaacttctgagctcaggttatctgcccgccttggcctcccaaagtgctggaattacaggcgtgagccaccgcgcccggccagcatttaactttcaactccttttctaggtgtgaatctctttgtatttttcctacttggtgtttgttgagcttcttggatgtgtaaggttttcatcagatttaagaagtttccaaccattatttcttcaaatattttttctgccccttctctcctctccttccaaagttcctgatgcacatatgttggtacccttgataccgtcccaaaggttctgctctggaagaacttcttcactcactgagctgggaagaggtggggggaggacaaaatgcgacaaatttcctctgttcttccctaaagttcagtttctcaagcatacatgcttctcaaattgttgtatgtgtttggtcaattttcggagtactgaaatggtcatttgtggtcaatgttgtcatctctggggagatgtgccagtcttctcatttgactgtagtcaaagtaccatcctgtgatactgctaaattgaccctcaaaagggatttattaacttatatatataatcctagctgggtgtgctggcacatgccgtgttcccaggtacttaggaagctgaggtgggaggatcgcctgagcccaggagttcgaggccagcctgggcaacatagcgagaccttgtctctttaaataaacaaaaaaccaataatcctcccacccatcccccacaaaatgcccccttttatatacacatgcgtatgtttttgcatagaaaaaggttgaccgggtgcggtggctcacacctgtaatcccaacactttgggaggctgaggtaggcggatcatctgaggttaggagtttgagaccagcctggccaacatggtgaaacgctgtctctactaaaaatacaaaaaacttagctgggcgtggtggcacacatctgtaatcccagctactggggaggttgaagcaggagaatcgcttgaacccgagagactgaggatggagtgagctgagattgcaccactgcactccagcctgggcaacagagtgagactctgtctcaaaaaaaaaaaaaaaaaaggttaagggccaggcccagtggctcatcctgtaatcccaacactttgggaggccaaggcaggcggattgcttgagcccaggagctcaagaccagcctgggaacatagtgaaaccccatctctacaaaaattagctaagcatagtggtgcatgcctgtagtcccagctactcggaggctgaggtgggatgatcacttgaggctgggaggtcgagcctgcagtgagctgagatcgcgccactgcattccagcctgggtgactgagaccctgtctcaaaaaaaaaaaaagaaaggttaggaaggaaatagagcaaactgtaagccatagttccctgtcgagatgggcaggaggtaagatccccacctttagctgcgtaggttgtaccaaggagacgggagtgaatttttcagattcctatagaggaaccaaatgtgctagaaggccatccttgggtgggattaggcgctgtgcaggcagtcttcccttttctacagataggcgtctatactgttggaattttccacagcggtaatatatttgtgtctgtcttgtgcaaatgaacttttttgattcccaagagtaaacttcaatagctctgtcttgccaaatgtggaatggatttggttttttttatctctttcatttttgctttgcagtgacatgggctcgagggttggctaccccgctcaggtttacaaaactgccagtgcagagactcctcggccctcccagctggcccagcccagcccctttcagctctccgcctccgtccccaagtccttcttctccaagcagcctgtacgcaataagcacccaacagggtggaagagaacggaggagcccccaccacggccactccccttcagtgacccaaagaagtaagtgcctggacgtccagcgaggcgcccgccagatccacaccagggcgtctccggggcggaaagagggtgatgccacatgctgtcattgcacagacgactgtgggccagtgtaccagtgtacacactggggctgcagctgcaagcaggacaggcgagaacccctcttggggagctggcattccatttggggtgaccaacaataagtagaataagagaagcacgcaataggtcaatggtggttatccttgtgccatatccgggtgtggaacattccagggagaaggcatagcagctgcagaggtcctgaggcagtgagtgacacggttgcctgtgggcaggccggggtggctggaacagtttgggccaggggagggtgtgggaacatgaggtcagggagggatggggacagaccatggagggtcttgagggccacgtggaagggacttggcatcttccctgactgagatggagccacgggagggcatggagcagagagggggcaggatctaaattgggcattccagggtcgctgtggctgcgtgtggggaacagcctgcgaggagcagggaggagctgctgtcatggtccaggcgcagacgaaggggcgggagcagggtgggggcggagagggtgagaagggggcggttccggatagattatctgaaatggagcagaccgggcttgctggcagggtggatgtggtgtgagagaaagagaggggttgaggatggtgcgtcgtcttgaagcccggaggacagacttgccttgagtggggagcaggcttggggaaggcacagtagctcaatcctggatgcttcggtgcgagattcgcaggagacatccagacggaggcgtgaggggggcccttgagtaaggaatcccgaattcagtggagaggtcaggctggagggagaactttgggtgttatcagcctagagctgcgaggctggaagagcccctaaggcagggtgtggagagaggagaaatgtgggactgagactgaaaccccttgatgttgagccaaagtgagaagccggggaaggcggggaggtgcggaggcggagaggtgcggaggcggggccagggccaggagaggcggagctcgggcgaggaggctgggcccaggccagggtgatgagactgagaaccgactatatagggttaatcctcccagaggtcgccggagggttcaggagaaaagggtgaggcagaattgaggagctgcgtgagcagttcatttggggcattttgctttaaagtgaaagaggagaggggtgtgcagttgagaaagggttttgtttttcagtcggaggatacaggagctaacattgcctgagcactcaccacatcgaggttcagttctaagtggtttgatgcgaatgaatttactggatcccacaacagctccatgggggtggacctgtcctccccccaccccacccctttttttttgagacggagtttcattcttgttgcccaggctggagtacaatgacgtgatctcggctcactgccacctccgcctcccgggttcaagcgattctcctgcctcagcctcccgagaagctgggattacaggcatgcgccaccaagcccggctaatttcgtatttttagtagagacggggtttcaccatgttagtcaggctggtcttgaactcctggtatcaagtgatctgcccgcctgagcctcccaaagtgctgggattacaggcgtgagccactgcgcccggcccctgtcctcccccttttacagatgaggcagctgaggcccagagtcacagggctggtgaggaacacagcctggatcagagcccaggaagcctgggtcaaggctcacgtctcttgagtgaggggctctgccctcctccatcctgttctttgtagtgtcatctttcatgacctacatggagacattcaaatccggggatgacacagagcttggagggagagacgtgtcaggagacagaaacagtgtccctggagatatcagcaggcaagtgtgctgagctcacactgagagccagaggggattctgaaaactagactgatgattaaaactgcttaaaaactcagcagcctccccatgctcccgggattaatgatgcaggctcacattgactacacacgtttataccaggcgccatgttctttgccgaaactcccgctcagagcctggatgatctgcccctcacctctgccctcgttcccatccactctcccctccttgctctgttccagccacactggcctcttgctgttcctcacactctccacgtccaggcacaccccagggcctttgcactggctctcactgctgcctccagtgagctccctccagatcttcttgggtgcagctcatgaggactcgctctaatgccaccccctcaaacaggtcctcctggccttcagtagcccaggctgtcattctgtgtcactgtactctgttccacatcccgtgtcccccatgggaaacaggtgccaccgtcttagtcacaaggcacttgtaacgtgcctggcacacagggcatgctccatcctgaacataagacgtgtggatcttgtttgattctcacgtgaccccaataagtagatactataaggcccccacttttcagtgtggcccaagttgggccctgctgaaccctgttaccctcctcaacaatcacccgtacacactgcttcctctgcctggaacccaccccccaacccgcacccccactctaggcccactcctgcccacccatgttaatttgctggggcagccgcaacaaactaccacacactgagtggcttaaactgcagaaatgtatcatctcacagttgcggaggccagaagtccaagttccaggcgtcaacagggtggttccctccaagggcggtgagggagaacctgttcctggcctccctcttagcagccggtgggtgtcagcacgtagattcatcacccccgtctctacctcctcttcgcatgatgttctccctgcatctgtgcccacatttcctctttctgcaaggacgccaatctaacgggattaggggtctaccctaatgacctcattttcacttgattgcctctgtaaagactctgtctccaaatgaggtcacatttggagatgctggggcttaggacttcaatgtagctttttgtggggccccagttcaacccataacaccactccttgggtatcaacacagacacgcctttcttgcagaagttgtctgaacccccacaccaggctcagcccacccccagcacctgtcccagggcacagcgaccgccactcccttggcaacttgcttcctctctgtcacccccatggggcccagaacagagacatcctgaacctcacccagaccacacacttagtaggtgctcagaagatgtacctggagagacaacaaccctatccaacaacagctttcccagtgatgaaatccagagatggcttgtatatgtgtgtgttggtgtaaacatatgtaaactaagcatataaaatatcagcaggagacacaaatgaaatcgcttcatagttccttttaatatttatttatttattaatctatttattttatttatttatttttgagatggagtgttgctctgttgcccaggttggagtgcagtggcgtgatctcggctcactgcaacctccacctcctgggttcaagcacttcttctgcctcagcctaccaagtagctgggactacatgcgcataccaccatgtctggctaatttttgttttgttttgttttgttttgttttgttcttcttaatttttgtatttttaatagagacggggtttcaccatgttggtcaggctggtctcgaactcttgacctcaggcaatccgcccccccttggcctcccaaagtgctgggattacagttgtgagccaccgcacccggccccttttcatatgtatttagttgcagatacattttaaaaatcacaaccaaggccgagtgtggcgcggtggctcatgcctgtaatcccagcactttgggaggctgaggcaggtggatcacctgaggtcaggagttcgagaccagcctgaccaacatggagaaaccctgtctctactaaaaatacaaaattagccaggcgtggtgtcgcatgcctgtaatctgttccacatcccatgtacagctactcgggaggctgaggcaggagaattgcttgaacccaggaggcggaggttgtggtgagccaagatcgtgccattacactccagcctgggcaacaagagctaaactctgtctcaaaaaaaaaaaaaaaaaaaaatcacaaccagatgcagtgtctcacatctgtaatcccagcactctggaaggccgaggcgggggaattacttgaggctgggagttggaagccagcctgggcaacaacatagtgaggtcccacctgcataaaaaaatttttttcagccaggcgtggtagctcacgcctataatcccagcactttgggagtccaggatgggtggatcacctgaggtcaggagtttgagaccagcctggccaacatggtgaaaccccatctctactaaaaatacaaaaattagccaggtgtggtggcaggcacctgtaatcccagctactagggaggctgaggcaggagaatcgctagaacctgggaggcagaggttgcagtgagacaagattgtgccactgcactacagcctgggcaacaagagtgaaactctttctcaaaaaaaagacaaaaggcactttgggaggccgaggcgggtggatcacgaggtcaggagatcgagtccatcctggctaacacggtgaaaccccgtctctactaaaaatacaaaaaattagccgggcgaggtggcgggcgcctgtagtcccagctactcgggaggctgaggcaggagaatggcgtgaaccccagggggcggagcctgcagtgagccaagattgcgccactgcactccagcctgggcgacagcgagactccgtctcaaaaaaaaaaaaaaaaaaaaaagacaaaaggaaaaaaaaacttttttcaaggcgagtggatcacctgaggtcaggagttcaagaccagcctgaccaacatagtgaaaccccgtctctacgaaaatacaaaaattagccgagtatgatggcaggtgcctgtagtctcagctattgggaggctgaggcaggagaatcacttgtacccaggaagcggaggttgcagtgagccgagatcgtgccactgcagtctagcctgggcgacagagtgagactctgtctcaaaaaaaaaaaaattgcatatataaaatattaacttagaattattatttttgttcatacattccccttgtatgtgctgtagctcactgagcattttggagacagtgtctttgttatcgtgagaggcacttttgagtcacttcacttctaactcaattattttagattaaacatgttttgttgttgtggtggtggtggtggtggtggtggtgacagggtttcactctgttgcccaagctggagcacagtggcatgatcacagctcactgcagcctctgcctcctggtacaagtgattctcgtgcctcagcctcccgagtagctgggactataggtgcccgccagcatgcccggctaatttttgtatttttagtagagaaggggttttaccatgttggccagtctggtctcgaactcctgacctcaagtgttccacctgccttggcctccaaagtgctgggattacaggcgtgaaccaccatgccaggcccaaaatttagacaacagaggcaactcagagatgatgtccagtcctgtcagtcagaacctggaggatgttttcttcactgaggttttgaaagataaaacatgcacaaggtaaaaaataaaatactacaaaagggtttgcaatagaaagtaagcctctcggccaggcgcggtggcgcatgcctgtaatcccagcactttgggaggccgaggcgggcggatcacgaggtcaggagatcgagaccatcctggctaacatggtgaaaccccgtctctactaaaaattaaaaaaaattagccgggcgtggtggcgggcacctgtagtcccagctactctggaggctgaggcaggagaatggcgtgaacctcggaggcggagcttgcagtgagccaagattgcgccactgcactccagcctgggagacagcgagactccgtctcaaaaaaaaaaaaaaagtaagcctctctcccttccctggccctcagccatcctgctccctccccaaaagcagccattgtttcatttctgcatccttccagaaatgttccaaacgtgactgcacacacatgattgtgtgggcttcccttgcacctgttttattaatgtggtcacctcctgcatatgaactacttcctcacttgctcttgctcttcaagtcttttttttttttttttgagacaggctctcactgtcacccaggctggagtgcagtggtgccatcatagctcactgcagcctcaacctcccgatctcaagcagtctcctatcttagtagctgggcccataggagtacacaaccacacccacctagttttttactttttgtagaggtgagatctcactgtgttacccaggctggtctcacactccgcactcctgggctcaagtgatcctcccacttacgcctcccaaagtgctgggattacaggcatgagccaccatgcctgacctaagtttcttggcaatagttccgtatcagtgtgtagaaagtgatgtcatttttggccaggcgcggtggcccatgcctgtaatcctagcactttgggaggccgagatgggcggaccacctgaggtcgggagttcaagaccagcctggccaacgtggtgaaaccctgtctctactaaaaatacaaaaattagccaggcgtggtggcaggcgcctgtaatcccagctactcgggaagctgaggcaggagaattgcttgaacctgggaggcggaggttgcagtgaggcaagatcgtgccattgggctccagtctgggcaacagagcaagaccctgtctcaaaaaaaatagaaaaagaaagtgaatcccacacgtgtccagtattagaaacgagagtttggtaaactccagtataccaagctgagctgtgtgtgagttttctaaaaatggtttcgcgctatacatgctgcttttttcacatgacgtcgtatctgggattgcctctgcacgccatgtggatctgccatgcgtctctggagggtgtgattctgggtggtgggcctggccctttcctggctgggggctgctgtctgctccacagacaggaccctgggagtgtccgtgcacatgtggcactgtggactcatgtgagcctttctgaaggacgcgtttccagaagtaggactgctagtgcagagagcaagcacattttattcatgcttccaggaggtcttggcacgcccctctcgaggggagcctgtgggcagtgcactggctggggggcgtgctgaaggccaggcctgcttcctcactgccgggagatgggcaccatgagccctgcactgagtcacactcccctgtgcagggcattctgggaaatattgaaatcaaaaggggtgggggagtccccttttgatttgtgtctgtctctctgtctctctatttctctcttttgaatctaaagcttttaatttgcccaaagaatacacatccctgataactgacagacccagcattaccctagacctggaattccaatttggggaggaatatgacctgaccaggaaaaaacctggccttgctctcgcccttcctttgttaaaatcccaaggctggcagctgagaaacagaaaaaggaaatccagtctttaaaaccctcgggaacccaagacatcttatttcttccccaggttcaaagcctctttttctttcttgcattacagaatgaagaagtccaggcaaaagcttttattaagctagtttttattatttttattgttataaccatgattatggttaagtaaattcagacacttcagaagaatatcagttgaaaagtaaaagtcccatttttccacctcctaataagattcctacctcccagaggttatcatggttcataatttcttccagaaattgttatctgcagacagaagcatatttttaaatccaatgtggctgttccccacaccatacgtgtttcctgccatctctgatatacacgtgacagtcaagcttggcagtggcgtgggtaggcactgcagcctggcggccttgatttgaaacctgactccttcacaggctgtgtgacttgggacaagtggctaaactcctctgtaccttaacagcctcatccatgagatgggataccaatagtctttaacatatatggctgtggtggggatcaaatgaatttataagctgggcatggtggctcatacctgtaatcccagcactttgggaggctgaggcggaaggatcgcttgagcccaggagtttgggactagcctgggcaacctagtaggaccccatctttacaaaaaaattagctgggtgtagtggcatgcgcctgtagtcctagctacttgggaggccagggtaggagggtcacttgagcccaggaggttgaggctgcagtgagctgtgatcacactgctgcattccagcctgggcaacggaggaggctctgtctcaaaaaaaaaaaaaaccaaaaagcaaaaaacacacacacacaaatgactacatatatgttccaagggaaacccaggccttgctctggtatggttcacgttctgctgggtagactgacaataggcaaagacacaggtcgggcacggtggctcacacctgtaatcccagcactttggggggccgaggcgggtggatcacctgaggtcaggagttcaagaccagcctggccaacatggagaaaccctgtctctactaaaagtacaaaaattagctgggcatggtggtgggtgccccaatccttgctactccagaggctgaggcaggagagtagcttgaacccaggggcagaggttccagtgagccgatatcacaccactgcactccagcctgggtgacagggcaagactccatctcaaacaacaaaaaaaagcctctcccctcacacagggggtctgtctctgtgcatgtgttcagcgtgggcctcccccactggctgccagctcggtgctcacggccgtgtccccagcacctgggacaggacagcacagccagctctgtgtggttcccggaaaacgtttgtggaagaagggaatggagccaagcccctctctgccacgcgtttgctgggtgaaggagagaaggctgtggccatgcgtcccgtggtggccggccctcttgaatccaaacagctttgaaaagtggcttgagcctccctgacacccctctgaccctgacgctgtcattccaggcaggtggacacgaacaccaaaaatgtctttgggcaaccgaggttgagggcatccctccgagacctccggtcaccacggaagaactacaaatccaccatcgaggatgacctgaagaaactcatcatcatggacaacctggggccagagcaggagagagacacgggagtacgtagggccctgtcccccgctcccgacccccagctcccaaggggatcccagatctgggcaggcaaggagaagggctgtgctccccacggtcacgccagctccttcccgtcgtgtccccagcctttggcatctgccagtcctgttgggggctatgggctcatggctgggagtgagggcagcgcattggtctgggatggaatcacaggataagcccaggcaggcactcgggaatctaccccataccgagaacctcgcacaactggagggcctcgtgccctcctcctccagcccaggatagaaacagccacatccacccaaaccacagggactgagagtggagcaggggctcccagaggaagttcagactcttgttactcagggacacgggtggaaagaacagtgggtgccagggaacctccacagcatccacttcccttcccctcccagccaggcctgccctactcgtcctcactgccaggcaggagctgttttgtggggactgaggtggaccccagcctccccagggttgggtcccaccagcctacagctgggggaagagagcacatcagcccagcgctacccactggggtcccagcactgactctggtgggtccagcttggctcacaccaccttccccaacccatcaggctttgatcgccagccttacccggagctggagggtggggttggggagtgggagtccctgggggaaaactggagcgctttgatcagaaaggaggcagaaggccaggggtggtggctcacacctgtaatcccagcactttgggtggctaaggtgagaggatcacttgagcccaggagttcaagaccatcctgggcaatgtaatgagaccctcatctctataaaaaaaatgtaaaaattagccaagggtggtggcatgcacctgtggtcccagctacctacctgggaagctgagataggaggatcgcttaagcccaggaggtcaaggttgtagtaagctgagatcgccccattatactccagattgggcgacagagtgagaccctgtctcaaaaaaggaaggaaggagggaggggggagggaggaagggagggagggaggaaggaaggaaatggggcagaaatggatgctgggtaggtaaggactcgccaccaatgtcctagaggggaagatgcctctgaggaccctggctatgagccagtctgtgacctcccccaacatcccacccacgccccacagcagtcaccgcagaagggcctgcagcggacgctgtcggacgagagcctgtgcagcgggcgccgggagcccagcttcgccagccccgctggcctagagccagggctgcccagcgacgtgctcttcaccagcacctgcgccttcccgtccagcacgctgcctgcacgccgccagcaccagcacccccacccgcccgtcggccccggtgccacccctgccgccggcagcggctttcccgagaagaaatgtgagcctgggccccctgggactggcgcggtagttaccccaaggttgggaggtggggatgcccgagcaggggctcacctggaggtcaaaggctagaggtcatcagtgtcggggccatctcagggaggaatggggttcacaggaacttcggggggcctgatggtggggcactgggtgtcacccaaggagcaagggatcattggccaagcatcagagggtcacctaggagtcagaagcacccaaggattggagtcacctgagaccagagaagaagtccaccctcagggtacaggcctagggaatggggctgcccagctgttgccctagcaccccccaaccctcccacccattccagctctaagcggtttgcttcctgagcattttatttgctttcctgactgctcccatgtttgccacacttgggggtggtgcatggtatgacttgttcactgcttaatcacccagaaaatatttactgagcactccccgtaaacaggtactgcgcacaccacccgcatcaaaagccacgagccagctggagttggccgtgccccagatgcaccctgtaaccccccttacccacctcctaacccccccacaactgaaagacagtacgtaagtttgcaccatgctcactgggtggcgaaacctggcctggaggggcgtgaggctgtttagggtccatagtccccctacttagtgctagcaatgaggagcttggggcagagcgctggcgtgccactgcgcgtggggtgcccctgacctttttgagtttgttacataatacacagcatctgcacacttactctctcaaatccaagcacatctcaaattcagaggcatgttctaccccaagggtctcagctgaggggctgtgcctgcctgtgccatctgtacagagcctcttgtgagctgtgggggatggggtggaggagactctgggaattttatgaagggcagtctgtctcccctattaaaactcccctgcaggccgggcgcggtggctcacgcctgtaatcccagcactttgggaggccgaggcgggtggatcacctgaggtcaggagttcgagaccagcctggccaatgtggtgaaaccccgtctctactaaaaatacaaaaattagctgggcatggtggcaggtgcctgtaatgccagctcctcaggaggctgaggcaggagaatcacttgaacctgggaggcagaggttgcagtgagctgagatcaagccactgcactccagcctgggtgacagagccagactccatctcaaaaaaaaaaaaacttcccctgcagctccgttgccttggcatttgcatctgcactccttgccctggtggtgtggggtgcccacctctgctcctccacctcacagagccttccttttgatcactcagcacaccagaccctccctgctcagggcatcctgcacggctgttctctccgcccgccatgctcttccctcagtcctcttctgggtcactcttgtccttcagggctggctccattcctgctttttcctggaaggctcctctaagccctggactgggtcccagcccccatctcaactccagagcttctgggccctcccctgcgctcccttcctgttcctgcagcgcctgctgtgggcggggctctgccctcggtgccaggatgtggccctgagcaagcagagcacacccctgccctcacagggctgccactttagtggaaatttccctgctccccaggcttccctccacgtctccttcctcggcctctcctccctgctgctctgtctctctgcccaaggcagggctggtcacgaagtagatgttcagtcactgcaaaggacggggacagcggccaccacggagaggtggtgacagagaacacaggcatagactccacaggccgatccgaattcctccagcttgctgtacctcattctttcagtcttggctcagatgccccctcctccaggaagccctcccttcccctaccaggctgagtcaggcaccaccacaggccccgtccccccccgcccccccgggtttctctcacccccctccgtccctactcaccgccttgtatccccatcaccatcctgagctgtcactagatgagaatgtgtctgtctccaccaccataccgggggccccccaaagacggggcctggggttttctctgtcactgctgtgaccccagctcaggtccctctgcatcacacagcacacacacacccttctctgtccatctgactcccccacacccctgagctggggagagtcccgtctggcctcagtgtggccagggaccctgggcctctccatttcttgtgtgcctgctccagagcccttcccgggccccatcccagatgaagagacatggtcatccctggcctgggcttcactaaccaagtgccctccacaccaaggagcctgtcacacggtgctcctgatgccctgctcagcaatggcagccactcccgtggctcccaccagctgagcagtgagacgccagcaggctagaggcacagaacaaggaggccaggggaagagcaaggaggcccagggtggagcatggaggtcaagggtggagcaaggaggccaagggcggagcatggaggtcaagggcagagcaaggaggtcaagggcagagcatggaggtcaagggcagagcaaggaggtcaagggcggagtgtggaggtcaagggcagagtgtggatgtcaaggcggagcaaggaggtcaagggaggagcatggaggtcaagggcagagcaaggaggtcaagggcggagcgtggaggtcaagggcagagcgtggaggtcaagggaggagcatggaggtcaagggcagagcatggaggtcaagggtggagcatggaggtcaagggaagagcaaggaggccaagggtggagcgtggaggtcaagagtggagcaaggaggtcaagggaggaacatagagtcaagggcagagcatggaggccgaggggggagccaggaggccgaggggggagcaaggaggctgagggacgagccaggaggccaaggactcgttcattcagccagcacttactgcacaccacatatcacagagctgaacggcctgagtttatgtcccacgtcttccactcacagatataacctctctgtgcctcagtttctttgactgtaaaatgtaaaaaatagtgcccacatccctgggttaaaagaatcaaacaagtgaatatgtggaaagcacgtagtgtatacctcatatgtagtcagcactgagtagtactagctggaagccatgtgagcccaggcaaggcagcgcctcgctcgggtctcagttttcctcttccatgagcagagatcatgtcaccccccgcctccgccagcctcacagtgaggctgtgagatgatctcccttggccctgcacagaggaggtgccgggaatgcagagcgggctgggcccacggtcaggctctgccgattcccagctaagggccctgaggtgtgtcttctggtctctctgtacctggctgtcctctgtccccttccctcaggggcttcaaggagtcacagagccccaggccagagcccgagcctggtgcctgggactctctcaatagccgcagcaggtgcgagtgcagtgctggcgccgttgcttctcacttccaactcctgagatgtcacaggcctctcctctgctcagcgtgtcatacctgaacctgcccccccacggcaaccccaccccgtgtaaacactgtccatacactggcgattccaatcacaggtgcagctgggactctcctcgtcgccagctcctgtggccagcctccgtcccaccatctccttggaatgtccagggccatctccaccgagcacctccagaaacagatttctgatcccccaccccagccttcccgatcagagccgcaatcctggcccttctctttgtttcacagccatatccaaccctcaggaaatcctattggctgcccctgaaaagtaggcccagaatctgcccctgtgtcctatcacggccccaccctggtcctgcccagcatcaccgtctccattgtgggttatggttacagctcctacctgctccctgtctccccccaaatccccccccaaacacacagtccgtcccccacatgcacccagagggagtcttccagggcactcagggtgagaacacagtcgtcactgggacccacaggccccacacggtccggccgtgttgcctctgttctcgcctcctgctgcttcctcccttgctcaccctctcccagccataggggccgcctctgtgttccttaaaccttccaggcacactcctgcctcagggatttagcactggctgttccgtctgcctggaatgttcctcccccaggtaatccgcctggtgcactccctcctccccttcagagttttgtccagatggcatctctgccaggcctggcccagcaccctgtttgaagtcaggcctctgtaggctccagcactcccagaccccttaccctgctggaggttttcctgggcatgtagcatctctgcataagcaatgggatgtcttcatgtatttgtgtctcccgcattgtcacactcaaccactgccatctccaccctccccatccagccaccatctcagcctcggagctctcgctggctgatgggcgggaccgccccctgcggcgcctggaccctgggctgatgcccctgcctgacacagctgctggcctcgagtggtccagcctggtgaacgcagccaaggcatacgaaggtaggcgccttccacccagtcccgccaggcccccaccccgtcctctgttctagagggattcatggagggcctcatggctttgcagggatacccactcaggttccagaatcagggagcagggttcaagtcctgccccgtcacttgcttaccatgcagccccgggcaagcgtcgtcatctctttgatgccagcgaaccacgttgaccaacaagcggaagtgaccatgcctgaggctgccatgacgattacacaaaacaccacgtgtaaaacacgtgaggccaagcacagtggttcacacctgtaatcccagcactctgagagtccaaggcaggaggatcgcttgagcccaggaggtggaggctgtgtggtgagctgtgatcacaccactgcactcactgcactccagcctgggcgacagtgcaagaccccgtgtctgggggaaaaaaaaaatctgtccctgaggacatttgggttttcagcgccagatctgggagccagggagcggaagacttttagtgccctgagggtcctgccaagaccttgcatcctgggttgggggttccccataccaggcctgcagggatcctcactccctgggttccctggagcagtggacagggtttgctctgccacccagggccctttatgtgctggaagtccgtgctgacggggccaggcagctgtggcatctcctctctcatgtgggtctccaagcatcctggggccaggacagccagttccaggacagtgggaagtgaggaaggcctcaggtctctccctggagacccagatgccatcagcggttgtagtgttgtttgcggaagacagagctgcccagacactgaccactcccccgcaaccgtgggccacaggaaagggctaggatagccagagccccttacccactcccagccgctccgtgtgcctggcatgcctgggagctgtgcgccccatgtgagaaagctgagggagcctggctggtggcactgatttctcccccaggctgtgcgtcacagtcgcctagggagctttttgcttccttataaaattaatagatgaaacacagaaggttacgggggagaggggggagtagcagaaagacctgggaggaagcacaccagcaccaccatggaggtgcctccccgggagccggaaaggggctggcagggagtgcaggtcagggtggtttcagcttgcctggaggtgtggtttttaatgaagatatatgtgggttttcccttgcaattcacataagtggaaaagactaaaggaattctcattaactttggtagatgtgttcatagcatagtaattttcttaaatatatatatatatattttatccactagagctacttagtgaagtttctacagatgaaatacaaagacatctagaatttgatttaaaatattccaggttgggtgcagtggttcgcacctgtaaccccaacactttgggaggtcaaggtaggaggatggcttgaggccaagaattcgagaccagcctgggcatcgtagcgacaccctgtcactacaaaaaaatttattttacttatttattttttagagtctcactctttcacccaggctggagttcagtggcgtgatcttggctcactgcagcctccacctctcaggttcaagcaattctcctgcctcagcctcctgagtagctgagattataggtactaattttaaaattagccaggcatggtatcacacacctgtagtccaagctcctcgggaggctgaagcaggaggatcgctggagcccagtagttctaggctggagtatgctgttctgatgcggtgtcttcactaaactcaacatcaatatggtgacctccagggagccagggaccaccaggtttcctaaggacaggtgtactggcccaggtcagaaatggagcaggtcagaactcccatgctgatcagtaatggactcgggtttgtgaatagccactgcactccagcgtgggcaacacagcaagaccctgtctcttaaaaaacagatgtcattatacattaaattcaagatagaaaaaaatagctataaagggtattattcagagaatcggagaacatttgcagatgactgtatattagataatatcatggccaggtgtggtggtgcatgcctataatccagcactttgggaggctgaggcaggcagatcacctgaggtcgggagttcgagaccagcctgaccaacatggaaaaatcccgtctctactaaaaatacaaaattagctgggcatggtggtgcatgcctataatcccagctacttgggaggctgaggcaggagaatcacttgaacccgggaggcggaagttgcagtgagccgagatggcgccatcgcactccagcctgggcaacaagagcgaaactccatttcaaaaaaaaaaaaaaagtaaatgggcaaagtattaacaatgagtggtgccagggaaagagtgctggggtttttactgtgctattcttgaggcacagaaatgaaagttggacccaaggagctgcttgcctctggggctggccctctgccctgccctgccctgcccctgatggtgccgccctcaacacacggcacacagggacgccttggtgtttttaacacctccgaggattccattgtctggctgttcatagctcactgaaccagccactgttggagggcactagggcggtggccagctgttgccattacaggaagaaaatctaagtcacgtttgaaaacgcaaacagctcaggtgcccccagtgccagtcacgtgtccaaggcgggacccaggaatcttcactttcactggcagccccgtgcgatttcttttctgtcttcaatatgcatgatgtgatctgtctcacttctctttttgcttttgaaatcttcccagcttcctccgaaggagagcgaattgtataacgaatccccgtggacctggcgccagcccgtccactttgtaacccttttttcctaccttttacttgtggaccaagtcaagtcacttatgttgagagcacgccaggttcggaatccggtcggttgctagctcgcactctcatctaactggcttcttcagcccttgcgttttgtatgaactggtcgttggatcgaaagcctcgatcggaatcaggatgggattttgattgtgttcttgttttgtgtgttcatttggttggttttttggcaagaatctatctaagtgccgatgcagtctgtcccaagtgtgataggaggcatcatggaggtttgcagggagaggcgtggtccgtctgttgcgggagaagccgggagccttgctgacccctctcctcctcctccctccctggcagtgcaaagagccgtctcactcttctctctgaacgacccggccctgagcccggacatcccgcctgcacacagtcctgtccacagccacctgagcctggagaggggacccccgacccccaggaccacccctaccatgaggtgaggtttccctgggaacacccgggttcataccagcggcaggcctgtgcagtggaagaggcttacccagagagaggcagccatgtgggtcacccccaccactctccgggcggaagctgatatagcagctactcccccctcctaacagacttggaagtcattacactgcacctgtctgtgcactggggatccacagtgaccaagacagactctgcccagtcccaacagatctcccagtccagcagagacgacacttgaatcaatacacacacagttgtttcgcttccaactttgaacactgctaagcaggccgggcgcggtggctcacgcctgtaaacccagcactttgggaggccaaggtgggtggatcacttgaggtcaggagttcaagaccagcctgaccaacatggtgaaaccccatctctactaaaaatacaaaaattagccgggcgtggtggtgcgtgcctgtaatcccagctactcgagaggctgtggcaggagaattgcttgaacccgggaggcgaagcttgcagtgagccaagatcgagccactgcactccagcctgggccacagagggagactccatctcaaaaaaaagaaaaaaagaaaggaaagctgctaggcagtgtctcccaatcccccagccctgtgcctctcgtcagccccgtcgctgccaatctcccgcctgtctgctccttcgtctcctcctctgcagattcctaaacctcacagacttctgcctcacgctcacccttcccagcctccctgccaggtgccgtgctgggctgtctgaggacctagtggcaactgaggccaggcctggccctcaggaagcttcacgggggaaggaagaggacggggacagatctctcacatttgtcatctcacgcgtggcttctcacattcagcgcagcatatttgactgcactcacttggcagaaaacaaaattaaaaagaggcagagagaatgtaaatggcacattctgcctgtacatggatttaaatagtgcatttcacactcgtctgcacacctcacggttcagggttctatatacaaccatccgtgcactgtacttcatgggcagtgggagcaatttttgagggtaattttgacttcttgcttttcacactctggcttcagaactcaacctccaccacgaacgtaggccccactgtaattacaagaaatcagcagttccagatggtgctgctgggctgaggggcaggagcagcatgggctgtgggaagcagcgggacctgtggcccctgggcggcgctcctggagtccatttgcccccatctccctctgcagctgcagatccccaagactcagcagcaaggttgtaggaaagggtgggcgaggcaggagggccagcccccgaccgccaccgcctctgtgcctgtgcacgcacggcatccagtggagcctccttcagccccaactccaagcaggaaagggctgcgcgttctctgcagcggccaggcaggcccagggctgggaggatctgcagaggggcagctactggccatgggcccctgattcaaatcctagcaccagcacgtggtagccatgcagcacctccaaaggccacagtgggcagaggagctctgtgagatgagccgggcagtctggggcttgttgcggggtggctctcagtgacggccacgtggtcagcatcactgccaggaccattgttggtcctgcccacaagggcaggtccttttgaccatctgtccattctcgtgcttcctgtgcctggacccgccaggtgctcagcaggtgtctgtagagtgggctctttgtatcctggaggtacgaagaaggggtcctccctgaagtcacatgcacggcccagcctcagggaaaacgcacacttaagggtgggcagccacccttcccctggcctggtgctcctaacaccccgtccacatccacagaggtgcccttggtgggtggagtgtgccgggtggagggctggcttcctgcttcccctcagagcttctcctcaggctttgctagaatgtcagggataagggggcctgtacccccaggctcctcagatgtgggccagaagccttccccaggggctttagggcctcaggctgaccttgtccctggtttttccagcgaggagccacccctggatctgacaggcaaggtgtaccagctggaggtgatgctgaaacagctgcacactgacctgcagaaggtaaggccgggggccacgccctctccatcccacttcccagacactgggcagggcagtcagcagggatcaggcacctgcccccgccatgcaggacccaccccacccccacacctcctgtgtttgagtgtagtcatgggtgaagagtaaacagtgataacaccccaggctaccaagcgctcagagaaactcatccattcttggggggagaataatcagcccaggcttttcggaaggcaattggataacatttatcaaaaaaacacaaaaaaactgtggctgggcgcggtggctcatacctgtaatcccagcactttgggaggccaaggtggtgggtcacctgaggtcaggagttcgagaccagcctggtcaacatggtgaaaccccatctctattaaaaagtacaataattagtcgggtgtggtggcgggtgcctgtaatcccaggtactcaggatgctgaggcaagagaatcgcttgaacccaggaaggtggaggttgcagtgagccgagatcatgccactgggctccagcctgggcaacagagcgagactccatctcaaaaaaaaagaaaaaaaaatgttgatccagtaattccacttgtgggaatttatccgtgacagcatgggtacaaagagattgtgaacaaggacgttcgttgccacactattggcaataaaaaattggagccagcgtggctgtcactcaacatgagaatggctgtgtaaattatagggtgtccatgcagcggaacagcttgcagccaattaaagtaataacaaatctatatatttactaacacgcaaaagaagtccagtaacttacataaaaaccaaagcgagctgcagcagtgttgtctagaatatcaccatacttatttatttattgtttaaccaccatggttgagagggccatctagaaggtgacagtcaatttgttctttggacttgtctccatggggcggaaggatgaggaggagactggctgggtacgttggctcacacctgtaatcccagcactttgggaggccgaggtgggtgaggtcaggagttcaagaccagcctggccaatatggtgaaaccccgtctctactaaaatacaaaattagccgggtgtggtggtgcacgcctgtaatcccagctacttgggaagctggggaggagaattgcttgaacccaggaggcggagattgcagtgagccgagatcatgcctctgcactccagcttgggcgacaagagcaaaacccagtctcaaaaaaaaaaaaaaaaaaatgaggaggagacttttatctattgtttctatacttctgggtaaaagccagaaaggtggcagagtatataatgcgtaagtcttcgagccgtggaatcaaaggggcccaggttctgacccccgccccactgcataatgctgcgcaacctgaaacaggtccctgcctttcgggggctacgtcctcctggaagaagggggtctgctcaggccaccctgcatccatgtcccagctccccacttgctgtgtgaggctggggtcctcttccaggaaactagggacagcgacagtccccaagtcctcgggtagtgtgaaggtgggatgcggtgacaatagtgatgtttgtcaagcgatgactccacatgtggttgcgttccgggagctctacatagatgagctccagacacccctcagcctcctggtagagttgcgggaaccaagtgacttgcccagggtccctcggttgtggagaggcagagtgggatgtgtgccccggcctggcctggctctagtggttggctccaaagcacagccgggccagggctcacaggcctcagggagccatcggctgttccaggagcggccaagcccacccgcctgatgccagcttcccaccctgtgcaggagaagcaggacaaggtggtgctccagtcagaggtggccagcctgcggcagaacaaccagcggctgcaggaggagtcgcaggccgccagcgagcagctgcgcaagtttgcggagatcttctgcagggagaagaaggagctctgaggtgggaggccgccgcccgccttcgctccttcccctcaggccgtggccctgctgcctctctccctccactcagctcccagctgccggtgtgaccaagatgacccatccagggccctccccatggacacggaaactccgatggcctcactagggctgtgagtcagggtcagcgcgcacagccctcatgccccagagggcgaagtggtctcaggcctccctccaagctgcccagctgtggtcccggtgagctgggctgtgcttacaccgctcccgggcctgccccgctgtccccatctagcctcttcctgggaccagcccttcgaagctgatggggacggagagaggagccagtctccagacgcctcggctccaggaggtcacacagcaggtttctgcaccacgcacaacaaagttgcggcttgtggggccgaggcccctgcatgaaaagtacagcgtgaaagcaaccctttcttccccacacccagagaggtgaggcccgcgtggacacagaccagggcgcctcggtccctagcacgtgagctccaaaaagcacgaacatgatcccctccctaaccccctcctcccaaaaagcagccaggagcactttcttagagtttaaattattttcttgggggcctgaggatagagagaggcaaggctagcctccagagccgatttatttgagagagaaactctatttggatctccaggacggtttatacgatctttttctatcagctcctcttccgccagaggccactgcacctgggctaggggtccacaggcccctccaccttccagctaaccaggccaggccggggcggtggagccaccacacagccgactctctcctcctcctcccggcacgacctggccctgaccagcagcctcggcctcttctgggttccaggaggggctcccgaagccctcaggacagggctggaggagaacagccttcatctcctcctctggtttttttttcctttgcaagtctcccagcccatctctccgagcagcggccaccagaccccctcaccatgctccccggggagcactgcaccccgcgaaccccactggacgctggttctctaaaggcaataaggggcggccatgccggtgtggtaccacgctgttcctccaggaaaccgtttctttttttccttctttaaaagcaaacagaaaaagatatatatatatatatatatatatttattttttcatgtagagttggcgccagaacaagcctgtatggccacagtctgtggattcatccccccaacctcaagctgaggaccaaggcgtgtcccctgtgggctgggggtcagtgggaggaccagagggatgaagtcagggcaggccggtgccctttttgggaggcaccaggcggggaggagttggcggagcaggtctggctgtgagccagcaccaggcaacccggcccttgtccagggacctctgctgccttctctctggggtcaggaacctcagaggagggggctctggggactgcataggacgcaggcactcggaggtgccggtgtggatgggtgggggtgagagaagagggttcttatcgcgtctcctgtgatcagcctctggccccctggaggaggaaacctcagcgctgcccctgcccccaccctcacccccaacaccaagagtgaggtgggcgtgccccaggcagcgtcctcagccctggccagctactgtgatgccatcttctcccccatccccttctctggggggcccacccgtcccccacccccaccccttagaccctcatcgggtccctttttttttttttttttcagttgtctcctcccatcttcagatcattcgaatcattttggggacttaatcatgtacatggacaagtgtaaattatgatttttggttttgttttctgttattttttaaggatttctgcaaaaacagatctatttaatttgaggttgatgttctatccaatggccgaagatagcagcaggttttttttttcatatgttgatttgtttcatttggattttttttttattattctttattgtcttttttttttccccatccctgtcttgagattttctggcatgtttctggaggtttcaaaggaaataaaggtttcatagaaatggcttgtgtgttcacttttggggcagctgcctggagttgctgaccagagggtgtggtccagcatcggcccctcctcctgctcctgtccccaaatcccccacaccatgaccaccacacacatgtcctaagaaccaggggcacctgccttgctaacttcttttccttggaatccaaaggacagaaatccaacactcagaatgtgaaatgtccttaagttcaaaagagtgagattctgcctcagaggtcatatactggaggcctgaaggccagccccagcccagagggttgtgttgggtcttagaaatagtggccaacttttaatctggacattcagccaggtgcagtggctcatgcctgtaatcccagcactttttgagaggctgaggcaggaggattgcttgagcctaggaattcaaaaccagcctggacaacatagcaagatcctacctctaaaaaaacctttttttttttttttttaactttttttcgaaacagaaactctgtcacccaggctggagtgcagtggtgcaatctcagctcactgcaacctccacgtcctaggttcaagtgattctcctgccttagcttcccgagtagctggaattacggggacccggctaatttttgtgtttttgtagagacgagatttcaccatgttggccaggctggtctcgaactcctgacctcaactgatctgcccacctcggcctcccaaagtgctgcattacaagtgtgagccaccgcgcccagcttaacttttttttttaatggatattgcacatgaggaaggccaggtttccagcttggttgatctgtcctttgctgcaagactcacaaggggcccctgcctcctttggccctggccacatggctgcatttgggacactcttcccccttctgtctgtagaggtgggagcagacccctgctgccacttgccaagtgaatgctttgggggtagaaagcagcccctgatcgccccagatctgcatctggcctggtgaacatttgcattttgggaaccgggatcaaactggtttctgaatcaggaaattcctcctgaaaatcccgaagtccagccccttgagggaagcctagcctcctgacggggctggccaggtggggtctttctgcctcccttacccatgtacctgtcgtggagtttcacatctctgagctaaaacccagtgcttctctgactcagaccctgccccctccaaaaaatgtctttttccaaaaggcgtggggctggcatccggaggagcaggaccagccattcccacatctcctaaaaattctggagttctagacaccctccctgtctccgccctcctcctcctcgaggccccgtcctcaacccgcactgccctccccccgccaccgggcgaagggggcgggaagcctgggaacaggctgttctcacatcctctcctggcgccggagccacgccagctgcttccagcaccccacaactcgcgcgcacgccagcccctggtcgcgcccaaactgtgctttgaggcccggcccttcccttcgtgtcccagtttccagcttcctctgcccgtctcggacatccctgtctctcctccccaatctttctgggtccctcatacctccggctctctctgcagattgttctgctgttcccctaaagtctgtctccttctctcccctgccgcccgcgtctctccccatctctgcctgttgtcctgggactttgcctgcccctgatcccaagtctctctctctccacccgcaatgtggctccctctcactcttccctctcctgatagatgttacctccttctctgcctcccctcttggaggacctctccctaaatctgctgctgctcttccccaatcaccgtcctccttctcctcctcccgtctctcccagcatgtcagctattttttattagttattccctctctgccgttaaacctccttctcacccctgctcccttcctctctcctggtccttcctcctgtctctctcccttctgcaccctcttgctcttttttctgattctctcaataactgtgtgactgtcctcgtctctttctctctcctgatctgtgtcctagttccctcactcctcactcccgccccccacccgtcgcccacatctcagtctctctcccagtgcccgtgtctagataccctcctgccctcccttagcgcctctctttccaccttatcgccaccgctgatttgccccacatccaggacacggagccccctggagatgtctgggtctgggatgacacctcctgacacccccgttccccaccccagcctcaggaggggccaacccaccgtcctcttcccagcccttcccttcccccggcccggctcccgcctccctcccggctgcgcccgctgcagctgcagcagcccgttgccagggcaaccacagctggctgggcgggagcccctccaccccatcccccttctcctcctttctggcaaagcagggcggagctgggacaaagccggggagaggcagggtgcaggcaggggaagaaggaggtggatggaggtaggggctggctggtcgcctcacccccaacaaggcccgtcgacccccggtcctccttcttggtgatgccccaaaccagacgggagaacgaggcagtcgtgggcagaggggtcaggcccagtttaatacacagaacaagttaattcacagcagaggcaggcaatagaggagactcggtgacaagtgagggggcactcctggattaggggacatccccccaaaacccaccacctcccccacctgcagtctcagtttcccttttttaaaacccgaacaacaaacacacacaaccacaagaaacaaccacgccccctcactcccccaaaatggccagcgaggggggcgggggccgccaggcctggcggggcgggaggagggagagaaaaggagtccgtggcggagtctgtgcttctcattccagcaggcgctgggcgggggcccacccggccccaccaccgccacccaccagccacggcaggcacggggcgggcacaggctggggcggtcggggaggggcaggaacagagttcaaaaccaaggttcacatcatgcagtatccaccgtgggcaccaggaggggcgggtggacaccacgcccaccgccctgggcacaagaggggaaggcgcccaccttgggtggggcgcgggacggctgcagctccagaaattggggttggggcgcccggcggggggccggcagaggcgggtgcccggtggacactctcagcagcgcccctccacccagccaggccttggaggactctttgtatatattaacttcttttcttttcttcttttttttttttttaactttttgtctttttctttagaaaaaggctctgtccatgcccctggctggcacccaccaccccccatgcccgcccagaggcggggtatggctttgaggggagaagcccctggtgtccatttgccaagggacagagagggagggagggagggagaggccctggccgggcccacccacccacagggcagacattccacttgcacagaggggagggggtggcccagccccctctcggcttccccctctccccctccccctgcgggatgttcagggtgggggagaattgaggagctcggagaggcaggtaggcgagcaccaccccagagtcgcggcgagccgagccggcctaggtgagggtgatgtaagcagaagccttttccttcaggtgccggagacagaggtgacagctccagctccctgcgggggcagccgaagctgaagtcaggcccgggtccgggagggctgccccagccccttcccaccccgaggacacacagtcttccacaaccaggagatggcgttcccacccacccgccccatgggatgcccacctctcctctcaccttccgggggctccgccatggggggactcaggcagtacatgtggtaaccccgatcgcagtcatcacaaaacagcagctggtcctggggggtgagacccgcccagctggcaccctgggggcacgggcaccagaaacgggggtggggggctggggcaggggctaggtcaagggggctgggggaggtgaggccttccgagaaaggttctgagaaggtctttgcagcaggaaatgtgtgcgcaacactgcttagccaaacacatatccctcaggacagtccctttgcgatttatagtgggggttttataaggctctgtggaaggcttattattattattattttatatttttagagacagggtcctaccctgttgcccaggctggaagtgcggtggtgcagtcacagctcactgcagcctcacactccttggggctcaagtgattctcctgcctcagtctcctgagctgggactacaggtgtgcgccaccatgcacgacttttttttttttttttttttttttgagacgggagtctcactatgttgcccaggctggtctggtctagaactcctgggctcaaaattcctcagcctcccaaagtgctgggattacacaggtgggccaccgctcccggtctgtgggaagtttaaatgacaccaagatgatctgatagcagctctgccagaaacggtcatggcttttgtttttgtttgttttttttttttttgagacggaatctcgctctgtcacccaggctggagtgtgcagtggcgccatctcggctcactgcaatctccacctcctgggctcaagccattctcctgcctcagcctcccgagtagctgggattacaggcacccagctaatttctgtatttttgtagagatggggtttcaccacgttggccaggctggtctcaaactcctgatctcaggtggtccacccacctcagcctcccagagtgctgggattccaggcgtgagccaccgcgctccgcctgtggaaggctttaaacaaccctaagatgatctgataccagctctgccagcagtggtcatggctttaaatctcagctctgccatttccctagctggctgaccctgggcaggtctctttccctctctgagctcagtttcttccctgtgaagtggaaacaagaccacctgcttcagagggtggttgggaggatccagagagatgaagaggaaaaagggccaggttcgatttatggacaccggcataatgataacacaggggactggtgttcaccagggaaggctcaggcacaggctttaggcttaaggggcagaggtggacgtgccaggcggggcgggcagcagggcacgcggggggcgggcggcactcacgtcgttctcggaggttccgcacaggctgcaggatttgcactcgatgcactgccagcggtaggtccgcacggctgccgtcatgttcaccgtgaattgtaaacacgaggggtgtcctgggggccaaggggcaggggtgcagttaggaggtcaccgtgcccctggtgggcactgaccggcaggggagccatagctcagcccctacccctggctcatgacgccaggatgagctgccgggatccacagcctgaccccacacctgcccagcaaccacgtggccggcagcagtcccccggccaccacagtctcctaccacaaccaccatggcaaccacactctgctccccagaacgccatggcaaccgcattccattacccacagtgctgtgccaaccactttctaccacccacaacaccgtggcaaccacattctgttaaccaccgtgctgagacagccactttccattacccacagcagaacggccaggggtcctgttaaccacagcaacgtggcaaccacactctcccagccacaatgccatggcaaccaccttccacaacggggtccccacacttcggtttcatgcaactgaagtccattccacttggtgccccagcaacaaaactgttactcacatcacagcactgtgcagcgccaggcttagtcattccacagccccgctgcagagacacccgcagccgctacctgcagccacgacccatggcgcccgccccctgcaaccacggccccggtgccatcacaactacattccattatactgagttgccatgacaaccatatttcactacccatgatgccacgacaaccacaattcatgacctactgtgctgaggcaaccagagtctatattgcccacaagcccaccatgggaaaccacattctgttaaccacaactctatggcgagctcatcctgctaccggtgcccaggtggtggtgtccgtcactcacaccacacagcccactacctgccatgccttggcccctgtctcttgctactccttttgtcttgttttggtttttgaaacaaggtctcactctgttgcccaggctgcagcatagtggcaccatcacagtgcactctgcagccttgacctcccaggctccagcgatcctcccacctcagcctcccgagtagctgggactaatggggtgcgaaactatgcccagccttttttttttttttttttttttgagacggagtcttgctctgatacccagggtggagtgcagtggtgcaatcttggctcatggcaacctctgagccccgggttcaagcgattctcctgcctcagcctccggagtagctggaactacaggcacgcaccaccacacccagctaaattttgtatttttatagagatggggtttcaccatgttggccaggatggtcttgatctcttgacctcatgatctgctcgccccagcctcccaaagtgctgggattacagatgtgagccacatcacccagcctggcctattttttttttaatagatgggctctcattatgttgccctggctagtcaaaaactcccagattcaaggggctgggtgctgcggtggctcacgcctgtaatcccagcactttgggaggtcaaggcaggcagatcacctgaggtcaggagtttgagaccagcctggccaacatggtgaaacccccgtctctactaaaaatattaaaaattagccaggcatggtggcgggtgcctgtaatcctagctactcgggaggctgaagcacaagaatcacttgaacccaggaggcggaggttgcagtgagccaagatcatgccaatgcactccagcctgggtgacagagggagactctgtctcaaaaaacaaaacaaaacaaaacaaaacaaaaaccttctgggctcaagcgagcctcccacttcagcctcccgagtagctggggctaatggggtgcaacaccatgcccagctaactttttttatatatagatgggatctcactatgttgcccaggctggtctcaaactcctgggctcaagggagcctccggcctcagcctcctgagttgctgggattacaggtgcacaacaacacacctggataatttttaaattttttgtagagatgggggtcttgctatgttgctcaggctggtctcaaattcctggcctcaagtgatcctcccacctctgcctcccaaagtgctgggattacaggcgtgagccaccacacctggcctctcactactcttgatgccatgctaagcacaggcagctacccacagtgccatgagagccacatcccattatccctaaagcctcactgatccgacccaattcccacaatcctcagcagttgcatcagcctcgctagctctggttatccacagtatcccctacatgctccgggtcccctcggtcctcaccgccttgcctccctccctccaggtctgcactcctgaatgtcctctgcacccggcccccagaaacctcaggtggggagcatcacctgatcgcccacagtccgcacaggagatgaggtcctcgggacaccccgtcttcttggagccccccaggcagaagtcacagtagccgttggggatgacagtgccgtcgggcgccttcttggctgcaagacagcagacaggcattggcacggggcaggcaagggcaccccgcaaaggtggctgcagactttaggagcagaaggaggcatccgtacctgtgtgtttcctttgtgcctcagggacccaggccaattctttgtaaaactctggggtaggggggacagagagagggactctcaccacaggcaaggctccaccctgcccccagcctcagccccaaggatggacctcttagtccaggcgtggggagctgggaagagtgagtagctaccccaagctgtggggagaggtgaaaacagttctcatcgggactcccaactctgcctttttaaatttttttttcaattaaaaataaaggcagggtcttggtatgttgcccaggctggtctccaactcctggcctccagtgatcctcccacctcggccactgccacaaagtggcgggattataagcgtgagccactgcacccagccaggattcccaactccttgagacaactgacatgtcctctttattgggtcaaaacttggtagacagcttgaggaagggctccctgcctcccttctcacatacatgtctcccagccagccactcccaactgcaccctcagtaatttgtatctaacaaattcagcgagtaccccagccaagatctggtatggaaacagacactcggaagaaaaactccgaacactgaggtgcgtgggtgtgtagtggccaggggtgaagacactcagcctctgcctctgagagataggtgggaagacagtgtctccctactgcctctcccaaaccctcctcccctcccccatccttcagctgtcagaactggcatgggattggcaagggcggaagccaagggctcccaggccacagaccctgccccttgaccaaagcttagcagagaaaggagaaagggaaggcagggcgggaggggagccatctatcaccccccctccccaagctctaattgaaacaataaatcagacccagaaatattacgcccggccaggagcgaaggagcgatggttggttgccatggcaaccccggagccagcatccccatggtcggtggggggagggaacggctgagctggagattttccagaaatgtctaatgcccccccacccccacccccagctgggctcctcttccccactcccagggcccctggccacccccacctggcctgccagctcacgtttatggttgtttttccggtggaagggcagggcgtggcgttcggcgttctcctccccctcctcctcggccaggtgggtgtgggtgtagtggtagctgagccccggccggttcttataccgtttcccacagactggggagcgagcgagccaggagggcctgtcagcccctccgggcccctgccgcctccaccctggcctccaggatcacacctcccccctcagccagagacctgagcagcctcccaacccgggtctggaacgggagggagagggccacgaggtggggagtctctgggcacccctctctctgcctttccccctcttcagaaggactcactatcacagacatacggcttgtctcggtcctccagggaagcggtgtcctggcgtttccggagacccccgatgccatatgcctgtggggagagtcaggagtgaggggccaagaaagtgagaaaacaggccaggcgtggtggctcacacctgtaatcccagcactttgggaggccgaggcaggcggatcacgaggtcaagagatcgagaccaccttggccaacatggtgaagccccgtctctactaaaaatagaaaaattagctgggcatggtggcgcgtgcctgtagtcccagctactcgggaggctgaggcaggagaatcgcttgaacccgggaggcggaggttgcagtgagcagatattgcgccactgcactctagcctgtgacagagcgagactccgtctcaaaaaaaagaaaaaaaagaaaaaagaaagtgagaaaacagtgtcttttgcaaattcaaattgcagctgtacaaatgtcctagctgtggggccttgaacctctccaaggttcagcttcttcctctgtggcatggggatgaaggtagctctaacccactgcataatctctgctttgcaaatggcttaatacagatgagcctcagtttcctcatctgtaaaatgggtataaaatcccccacccctgcaggccgctctggggattcaatgaggtcagactgaggtcagactgtggcaggggcggaccactgcacctgctccatgaatgagacctgtcattgaggggagcggggaagaggagaagcttggggtgatacctttcctttggccctgttcttcctcctgggaatgtcatcctccaagtcttccacctcgaggtcatgcggaaactccagcaactgctgtttctgggcaatagagaaaggagacgggtcaagaaagtgggggccactgacctgcttttgaggggctctgggcaaaggtggagattgggggtgagagtataagtcaggagttcttccaaatagagatgaagtctgggaggatggtgactgggatgcccaacagccagaagaaaccgggggggtttcagagcaggaacgtgagggcccgggctggtggcaggcaggggtgagacgaagccatgcagcgggggtcccccagaggtgggcccacctgacagtccataatggtctcctcctccttcagctcaatcttcttctcccccgtctctgcacacagtagagcctcgaggaccggcccttccgggaggccaccctccttcttcaggggtgcttcacagtctggggacagggccatgggggggtcagatggggaagttgaccccggaggactcctcaaactatgcaggtggggggaccatgctctttgcaggagggaagaggctgcagaggcaaggatttaaccacatgccctaggagggaggcccagactctggggagacccagtcacgccctcagatgccctgggatgcacagcaggagacacggtcagaactttggatacaccagaaagcctcagaaaaagacacagttaggccatcaggcacacccagacctactcagggaagacacagcgactctcaaacatacccagacaaatatggacagatccagacactcgcagaggagacacagggacacccgcaggggacatccagacagatcgtctgagacagatgcgggaaggaagaggcccagccatgctgtcttttttcttttttttttgagacagggtctcgctctgtcacccaggttggagtgcagtggcgcaatctcagctcactgcgactcccaggctcaagtgatcctcccacctcagcctcctgagtagctgggactacaggcagagtagctggcatgctaccacactgggctaatttttgtatttttggtagagatggggtttcatcgtgttaatcaggctggtctcaaactcctgagttcaagcgatcctctgcctcggccttccaaagtgctggaattacaggcataagccacactctcagatacagcctagagactcaaagaggtatagccagatccttggagacacccagacacagggaggagacatagctggacccatgggtacactcagaaatgctcagagacaattagctggccaggcgcgttggctcacacctgtaatcccaacactttaggaggctgaggcgggtggatcacttgaggtcaggagtttgagaccagcctggccaacatggtaaaacctcatctctacttaaaaaaaaaaaaatacaaaaattagccgggtgtaggggcacatgcctgtaatcccagctactcaggaggttgaggcagagaatcacttgaacccgggatgcggaggttgcagtgagccgagatcgtgccactgcactccaaactgggtgaaaaaaaaaaagaaaggaagaaggaaggaaggagggaaagaaaagaaaaagaaagagagagaaagaaagaaagaaggaaggaaagaaagaaagaaaggaaggaaggaaagaaaagaaaaagagagagagagaaagaaagagaaagaaagaaagaaagagaaagaaagaaagaggccgggtgcggtggctcacgcctgtaatcccagcactttgggaggccgaggcgggcagatcatgaggtcaggagatcgagaccatcctggctaacacggtgaaaccccgtctctactaaaaatacaaaaaattagctgggcgtagtggcaggcgcctgtagtcccagctactcgggaggctgaggcaggagaatggcgtgaacccaggaggcggagcttgcagtgagatcgcgccactgcactccagcctgggcgacagagcaagactccgtctcaaaaaaaaaaaagaaaaagaaaaagaaaaaagaaaaaaagaaagaaacaattagccctccagatacacctagaccctggggaagacacagccagatgagatgcttggacacatagcggggagataccgacatactcagggagaatcactcagctagatacacacaaacacacacaggagacagacaggaagagacacagccaggtgggcactgccacgctcctgggtacacacagaccctcggactcaggaagagaaactgaccccgaggatcccgatattcctaaacacattcaagggtaagtccagatcctctgatggactggcacacacgtgcagaaatacacctgatacgccagacaccatcaggaagattctcccagacactccgaggcacccacacacccacagaaagagacggccgcaccgcctaacacacccagacacactcgggaggagccggacaccctgacagaccagacatacacaagacacaagccttctaagacacttggagacacctgggaagatacacctaagagaggaaagagctccaaccagacactgagacatccagacgcccttggggagatacagaggcagacaccctcaggcacccacagaaaaaaatacaggcagatggccgggcatggtgactcaagcctgtaatcccagcactctgggaggccaaggcaggtggatcacctgaggtcaggagttcgagaccagcctggccaacatggtgaaaccctgtctctactaaaaatacaaaaaaattagccgggcatgtcagtgtgcatctgtaatcccagctactcaggaggctgagacaggagaatcgcttgaacccactaggcggaggttgcagtgagctgagattgcgccactgtactccagcctgggtgacagagccagactccatctcaaaaaaaaaaaaaatacaggcagactgatccatcccagttcccaggggaagggacacagtcagcaactccatacacccacacacacctaacagatatcactatgccctccaataccactgggacccttggtggggcatggtggttcacgcctataatccctgcactttggagggctgagacaggaggatcccttgagctcaggagttcaagaccagactgggcaacatagtaacaccctgcctctatttaaaaaacaacaggccaggcgcggtggctcacacctgtaatcccagcactttgggaggccgaggtggccagatcacctgaggtcaggagttccagaccagcctgaccaacatggtgaaaccccgtttctactaaaaatacaaaatcagccgggcatggtggcgcatgcctgtaatcccagctactcggaaggctgaggcagaatcgcttgaacctgctaggcggaagttgcgggttcaaggttcaactccccgctaggtggaggttgggggatcacgccattgcacgccagcctgggtgaaactctgtctcaaaaataaataaataaataaataaataaataaataacaacaactgggcacctgggcccatgtaggaggagatgcagtcgccactcagtgactcagagaaactgtggaatctctgggaaacacccgggacgcacatgggcagacagacacacagccagccaggcagacacttgctagaaggcgataaaggtgatggacgagtgctaggacacacagcaggcgctgggacaccgatgggggccccagcggctgcacccaccgatcttgtactcgcagggcctgagtctggggtcctccaggatgttgagtctccgtttcttcctccaacagcgggcggggtacgtgtaaatctgtcccggggccaaacctggagagagaggggggtgagagggcggcggcggtggggcggcctggccccgccccgccctgcgccagccctcccggcggtacccggcccgcggtgggtcttctccatccagatgtagcagttgttctgggccacgccggtctgcgagtcgaggaagggcagtcgcaggctgcgctcggcgcacaggcgcgcgttgtaactgcggcagtgctcgatggcctcgcggtagaagtcctcgcctaggctagaggggcggcgaacgggcgggcggctgtcagcaagggcaggcgcacagggtcgcccagcaccccttccccggctgccgggccgcccaggctcgggaggggtgggccgacccctccagcctcacctctcccctcctcccactccgggacccaggctgggggaaggggacagggcccaggggcccccaaactgggactcaaacaggcccccagctcatgagtagaaacacgatacagaaacaaacaaaaacacaccgggacgtatccctacctgaacacatgcagacacacaacacaaatcacacacagtcacacgggattcacacacaaagagagacaaatcccaatactcacaaaggagaaacagacaaacctcacacacgtgcacacataaatatctactgaaaaagacaaatatcccaagttccatagtgtggagacaaatcacacaaataaccatgcacaaagacacatcacatatccacagacacacaccagaaacacatcacccacacaaagacacacaacatggaaacatcacaccacacacacatacaccccctcatgcatccaaagacacaagcatgtcaaaagacaggaactacagaaaccacttgcgcccctaggcacttacccatgtatccaaagacacaacacaaaccacacacacaatatccagacacacaacacaaagaaatcacacagattcacacaggtacacacacacatttacaaagatgcacgatgcgcaaccagtatctaaaatatcacacatccacacagacacacacacatataaaacacagaaacagccaaatccacccatagtcacacaaaaatttacacacaaatacacgcagccctacatacccaaaaacacagaacacaagacaaatgacatatagttccaaaggacacggacacacactgggagacccaaatatccaaagatatctagtgcagaataaaaggaaacagacacatgtccacacacctatcccccaaaaattcttaaaaaaaccagaacacaaataagtgatacacacacacactccacatcccaagacaaaggtagtgtggacttcactccagttgccaaggcccccgcacccccgggtcatttcagtctctcccagacccgagggttgcagggaagggatgatgtctcccttccccaaaaagaatctggaggccccccacgccctccaccccgccagggagcggtgcatccgacaccattcttgtcagagacccacagtcacacactctcgcacccccgcgcagccccgcactcggtgacagccccccagacaccccttcggccccacccccggtcgccacacacacacaggcccgcgtagacccgcccgcgcttcctctccgcctcccgccggcccgcaccacctcagggggccagggatgacagtggccatcttgctccccgggtcctgcccccagcaggtccccgccgggtcggtcctcccagcggtcgggcgggcgctgaggccgcccatccattcattcccggggggcgggagcacgagggccacggccaatcgcggcgacggggcgggcccgcccgggccatgctgggagtggtagtcccaggccagggggcccccgggaccccgcggggacgggacggcgcggaggaggggcccggggcacgcaccgtcactcacccgccctcactcgtccacatatcctgctctcgcgtgcacacaaccacatgcacacctggactcgcacacgcccacgcatggcagtttacacacacattcacgcggatactcacagcctcccacacactcctactcacacaccttcgcacggactcacacagccacacgcacacacactgcaatactaagagacgcagagacacctcccaggtgcccacacagacttctcaccaacatgcttccagcagacaccccctcaccgccccccacccaagtccctcctggctccagagaccccacccggggctgtctctcccagcagccacgctcacggtcaccccgccctgctcaacgccttctgcaggcctgacagcagcagtgcaggttagaaacagtagtcacacctccagggttcaaatcctagctctgccacttggtggccatgtgaccttggcaaatgacttaacctttctgggcctcagtttcctcatctgtaaaaagaggatgatgcctcactggagtgttgtgaggattaaatgagtaaatataggtaaagcattttaagaggtgactggcaggccaggcgcagtggctcacacctgtaatcccggcactttgggaggcccaggcaggtggatcacctgaggatgggagttcgagaccagcctggccaacatggtagtagtctctactaaaaatacaaaattagccgggcatggtggcgcatgcttatactcccccactcaggaggctgaggcaggagaatcacttgaactcaggaggtggaggttgcagtgagctgagatcgtgccattgcactccagcctgggcaacaagagtgagactccctctcaaaaataaataaataaataataagaaagaaagaataatgcggccaggtgcgatggctccagtctgcaatcccagtacttcgggaggcctagatgagagcactgcttgagcccaggagtttgagaccaacctgggcaacatatccagacccctgtgtctacaaaaaaaaattaaaattagctgggcatgatggcgcagcagtgtagtcccagctacttgcaaggctaaagtgggaggatagcttgaacctgggaggctgaggctgcagtgagctgtggtctcaccactgcactccagcctgggtggcagagcgagactctgtctctaaaagcaaacaaacaaacaaacaaacaaacaaaaaactaagtaagcagggcgccgtgactcatgcctgtaatcccagcaatctgggaggctgagatgagaggaccgcttgagctcaggagaacagcctgggcaacatagcgagacctggtctctactaaaaaaaaaataaatagctgggcatggtggcacatgcctatggtcccagctactcaggaggctgagtcaggaggattggttgaacccaggagatcgaagctgcagtgagctatgatcacaccactacactccagcctggacaactgagcaagaccctgtctccaaaaaaaaaaaaaaaaatagatgctcagtagatatttgttgaatgagtaaatgcacccatcatgtgctgggcacagttcaccccgggatgcttttattatctgcattttccaggtgaggaatctgaggcacaggaaggtaacctcacatgcccgcatgccctggcggctctttgaaggtaagactgaaggaaggaggcaggcacccctgacggccctccccaagtagtcctgacctccttctctctcccactgtcacccacactgactccacccgaagagatccccagggagtgagcagacccactgagtcacaaactgacccagtctctctgcaacaccaccaccccgtcccccctcccgtctcacccctcctccccctttccccttcccaccccttctccccctttccccttcccctcttccacccggacccctgtagagccagcattcaaatttgggcggctgctgtaattaacacgcccacaaacgccctcatccaccagggggcgccccagccgacagaagtggcccgctagccttcaccatttttgtcacttgaaatccccccaagagagagatccagtcaaggcctcctacactcacggtcacttctacacacacacacacacacacacacacacacacacactcctctagtcttagaccctttccacaaactcgcccatctaagccaggtaaggtcttggccggcccctctcctggaacaggaggtaggtctctgattcacatatggcctggagtggtgacaaggggattaagtgaggggcactgacacccctacgatcactctggcctccagggccctatagtggccacctcacaccttacccacggtgagctgtgaccccaccttcctctctcacctcccattagctcacaggtcccgtaacacaccctcttacacttgattcccacaccgctagcctcagacacgcagactcactcctgccccaccccaaactctcatgtcgatttgattaagagaagcccgagtgtagacactgagtgcagaccttcctaacagtcctcctctaccagcagaatttctatttttctttcttttcttttcttcttttatttctcttccttccttccttccttccttccttccttccttccttcctttctttctttctttcttttcttctctttctttcctctttctctttttctcttttttttttttggacagcgtctcactcgatggcccaggctggagtgccatggcatgaacacagctcgctgcagcctccacctcccaggctcaagcgatcctcccacctcaaacccccaagtagctgggactacaggcctgtgccaccgcacccggctaatttttgtatttttgtaaaaacagggtgtccctgtgttggccaggctagtctcaaactcctaagctcaagtgatctgcccaccctgccctcccaaagtgctgagattacaggcataagccaccatgcccggcccaccagcaggatatctacccacagacgcaggctgacacttgcagcgggctctcctttctttccttctgccctaaccacctgcacacaccactcccacatactctcctacacacttgaactcccagtcctctccctggcccaaacaatcctcctgccccatcccccaatgccctgtgtgggagctggcccacagtagaaatcaatttcataaatcaatattgatactactaataataatcactacatttggtcagtgtcagtctctgtgctaactgctttacaaagatggccttagccccacgacagtcccatcgggtggtaagggctgttagaagcccccatacacagatggcaaaactgaggctcacggcagggaacattcgtggctcaagctggttttggaactcaggcagtcggaacttccgagggcggcaccctgcagctccttctccccaggggatttgactcacattctttcaggagccagggagtccccaccttcacccccacagagaccttttggaagggaagggcacagaggggtagggccctcccagtccaggcttactgtagctgggcccctgctcacggctgtagcacacctcctcccaggggtctgggccagggtcagggtgaggggccccatcgcctgtagatccaccaacctgcacaagagccccgttcccagccattttgcggatgtcccctcacaggagagacagctgtctgtgtgtgccacttagggtgagagggcagcagaggggtgtcaccatcatacaccacctcacacggacccgagccccacacacccgctcccggcaccctgctcacggcgaagccacacgtgtaggcgcttgcctctaagtccctgccccccttcctctcccaactcccaccctccacctcccacccccattcccgccagaaaccagaagcaactggcggcctctggtccagccagcaggcgcatcccttctcgtgggtggggtaggggggcgctccctctctccctctctccccccaccccccacccccgcccccagccctcgatgttcaaggtcaaggcagccagcgcacggggttgggggaagggtgggggaggtcgccccggcccctttgtgcgacgccgcgggcgctcgccctccgcctcctccaccaggcccgggaggagggggaggggagcgcctcgctcgcctgcggggagggagggcgggagcggccgagtgcctgtcacttggagcccgctgtcaccgcctgggaacggggggtggggagcgctgggacgtggagtccgggatcccgaagaggaagcaagagcgagatggagagggggaaggggaggtgtggagagcgcgagggatggcaaggagaggagagggtcaggaggggccaggctcggacccaggcttccggattcccagccaccgggcccgggaagaggcgaacgctcggaggaccgcggccagggagaaagggagggaatccccggagaccgagggcgctcccggcaccccctcctgggcagccggtccccaaagggatcagagatgctcccgtttgatgtgtatgcgcggggagagggagggatgccgcggtccagactgacggcgggttcggggcttccagttcccgggatcccgggaggaaaaaggggaggcagcggggatggaactggggacccccgacgtctcagctcccaccctgcggccgcgagggccggggtcctcagagaaagaaggggaaagagagaaaggcgctttgatgagcggagagcgggtgatggaaaccctggagaccgaggtccggacttaggtgttcgagctttcagccccggccggggcaggcccggcacctccggagaccctgagggagagatggaggagagggaaacccctacccccactctgggtggggaaacggcctccgccacccccagcccgcgccgcattccttcactgacagcgacaaagaagaggcgcccccgcgaccctggaggggctcccgcccccaaccccagggggcgacagggggtggggacccccggggcaagggttcgcgctgggggcccccattcaactacggtccgcgcgctgcgtccccctcctcagccccagggcgggcgggggaagggctcctggtgggggggtctggacagggggcggggacggcagggacactcacgacttgagcgggttctgaatggcggtggccatggcccgctcggctgggccgcctccggcccggggcgccgctgccgccgcgcgcgggcccagcccggcctgcgccgcccgctctgccgcccagcgcgctacgatttcattcattcttggggctgcggcgcgagcggagcggggcgggccgggggcggggctcagccaatccccgcgcctcccagcgcacgacgggacgtggagtctaggggcgcgcggcggcgcccgagggcgcccctgcccggactacacgtcccagggggcgtcaggaggaccgcgctcccattggctgctggggatacagggaggggcggggctccccccagagcatctttcctccctccctgggagtgctcggtctccaactcgggatctccaccctccaggcaccgcgggcgcggaagcaggtggtccctagcttctagatgtccccagggtatgtggatgaccctagggtctgtcgtgtattcttgtctaggcctatttgggtgtctcttctatgtcggacagcctgtgaacaagcacaggggttaatcagtgcctttgttcatttactgagtgcctgctgtgttccaggaactcttctaggcactggggatacagcaatgaccaaaacaaagttgccgctctcaaggagctgacattctagtggagaaagacagataataagaaaataaatagataaaatcatttcagacagtgaaaggtgctataaagaaaagaaaatggggccagtcgtggttgctcatcactttgggaggcctgtaatcccatcactttgggaggccaaggcaggtggatcatctgagcttaggagttcaagaccaatatgggcaacatggcgaaaccccgtctctacccaaaatacaaaaaattagctgggtgtggtggtgcatgcctgtagtcccagctactcaggaagctgaggtgggaggatcacttgagcctgggaggcagagattgcagtgagccgagattgtaccactgcattccagcctgggtgacagagcgagaccctgtctcaaaaaaaaaaaaaaaaaaaagagagagagagagagagaaagaaagaaaaagaaaaagagaagagtccaggcacacacctataatcccagcactttgggagcctgaggcaggaggattgcttgagccccatagcacaagaccagcctgggcaacatagtgagatcccatctctgcaaaaagtttaaaaattatctgggtgtggtgatgcatgtctggagtctcagctactcaggaggctgaggcaagaagatcacttgagcctgaaagttggaggcagtagtgagctccagcctggacaacagagagagtctccgtcaaaagcaagaaagcaagcaagcaagcaagagaaagaaagaaaaagaaagaaaagaagaaaataaaatagattcagcagaacacagattccagaaagaaaaaagaagcaaataaaagataattttaaaaaaagaaaacagattgatttgaaggagtgaagaagtggcttctctgaagagatgacatttgagctaaggtctagaagttgccagcatgcactaagaagcatgtctaggcacaggatcaccaagtgcaaatgccctgggctgggaacaagtgtggcatgttcaaagatcaggaagcaattgagtgtgactggagcagagtgagcagggggagacagcctggggagagagcaaggacccggctcatgtagtaccttgtaggtcattataaagaaaatggattttgttctaagtgcaatcaatcatcctgaactctccttctcctcttctttttcgcacacacactccaagcccatcggcaaattctgttgtctctacattcaaaacatatccagattccacccactctctgcacttcatggcctgcaccccagtcctgtccatcattgtctgctgcctggactatggtagcagcttcatcactgggctcctgcccctcaagtctgctctccccacacagccagagcaggctatctgaagcatatctctgtgctgagcacagtggctcatgcctgtaatcccaacactttgggaggccaaggtgggtggatcacttgaggtcaggagtttgagaccagcctggccaacatggtgaaaccccatctctactaaaaatacaaaaattagccagctgtggtggtgcatgcctgtaatcccagctactcggaaggctgaggcaggagaatcgcttgaacctgagagacagaggttgcagcgagccaagatcgcactgctgcactccagcctgggcaaaagagagattccatctcaactaataataataatgattaattaattaagcatatatctgcatccaaccactctctggctcaaacctccagcggcttctttcataatttgaataaaatgcaaagccctcgctacgccctcctccatccctcctcaaccctcatcacatttctggcctctttcacctccttccttcccttggctaacttcactccagccccactagcttcctccctatttctggaacattccaatcccactccagccacaggacctttgcacctctgcctagagtgctcctcccacagacacctgcctcactccatcccgcacttcattcaggtctccggttaaatgccacctcctcagacacaaccctagctaaaattgcagcccctagcctcctgcctcagcctcccaaagtgctggggttacaggcgcgagccacaacacccagccaaaattatgaataaataaatgtattggccaggtgcagtttgctcatgtttgtaatcctagcactttgggagcccgaggcgggtggatcacctgaagttaagagttagggaccaactggccaacacagtgaaaccccagctctactaaaaatacaaaaataagccaggtgtggtggcacgtgcctgtaatcccagccactcaagaggctgaggcaagagaatcacttgaacccagggggcggaggttgcagtgagtcgagattgtgccacttcactccagcctgggcaaaagagcaaaaaactccatctcaaaataaaataataaaataaaataaatgtatcaattagtcatgctccatgcctctccccagtgtccaaaagcatgcacccagcatgaagagaatcaggtgggatccaggctctgccctaccccatatggacacttggacaacctgaagtgaggggcaaatttggggccttttttaaggaaaagtgcccagcacagcatctggacctaaggcttcaaggcagagagaagggatacattaaaaggcacacttggccgggcgcggtgcctcatgcctataatcccaacactttgggaggccgaggagggtggatcacctgaggtcaggagtttgagaccagcctggccaacatggtgtaaccctgtctctactaaaaatacaaaaattagccgggcgtggtggcgggcgcctgtagtcccagctattagggaggctgaggcaggagaatcacttgaactcaggaagtggaggctgcagtgagctgagatggcaccactgcactctagtctgagcaacagagtgagactccatcccaaaataaataaataaataaatgtcacatccactcatttctagagaacgatgatggtctccatccctctgtggatgtgctggggacacagcagcaaataagatggccccagactttgccttaagcttggagtccagaagagtaacagactcatcaccagacagtgatgtccagaggggtccaggtggggttaggggacacaggcagaggggtcggggctgggacaagggggacacaggcagaggggtctgggccaggattggggagcacaggcagaggggttgggtttgggacaagggggactcaggcagaggggcccaggtgggatggggagcacagacagaggggtccaggtgggatggggagcacaggcggaggggtcggagctgggacaagggggacacaggcagaggggtccgggccgggattggggggcacaggcagaggggtcggggctgggacaaggaggacacaggcagaggggtccgggcagggattggggggcacaggcagaggggtcggggctggagcgggggagacacagggcactgtgggagcccagaggcggctgtctcctggcctagcctgacagtcagggatgccttcctggaggagaggacacccggcctgcatgtgaatccttttgagtcctgaccccctgatctacccagacacagggcaaggttcctgctctgacctcttggggccttaatgcctgatcttcttaatgcccatcactcaagctttgaggaacaaaccctaaaagtctcaacctgtggtcacttctcctaaccctggaacccaagggtttgcccaccagagggcgctgtggccccagtctttgtccagcagaggctgcttcggaagcctcagatccgggagacatcctgcaggccatggggctgcccgcagagacactgggcccccaaccctgagcctcagaccctgcccaggacctggtcaccagggtatctccctctccttctctctctcacacacacacgcctctaatccaaggttccggtggacctggaatcacagaaaactctgccccatacccactgggtccagctttggcctctgaaggaaatgcaactgctaacagccacttctcccctctcctgcccgctacaattcagaggaagccttccctaagtggcccttgggatgttcagatgtacctttcagaagtttcctgcccaggcccagtgcggtggctcacgcctgtaaccccagcactttgggaggcggaggcaggcggatcacctgaggtcaggagttcaagaccagcctggccaacatggtgaaaccctgtctctactaaaagtacaaaaaataactggctgagcatggtggcaggtgcctgtaatcccagctactcaggaggttgaggtaggataatagcttgaacccaggaggcagacactgcagtgggctgagatcatgccacctgcactccagcctgggcaacaagagtgagaccctgtatcaaaaaaaaaaaaaaaaaaaaagtttcctgcccagatggggatgctgaggcgcagaagaggtggggctggggggccatgcagtatcagggcagcaacagtaataatcgtaacagcaaataaagactcattggttcagctcctcctgagtcaggacctgtactgagctttaacaagctacacacatcactgaatcatacagaccacacttgggaagcaggcacccaaatgtcagcaatgagctgagacgggaagccctcaaccttcatggcagggagaagtaggattcgaacccagatctggttgggtgtggtggctcaagcctgtaatcccagcatcccagcactttgggaggccaaggtgggaggattttttttttttttttttttttttttttttgcttgattttgaaacagagtctcactccgtcgcccaggctggagttcaggggcgccatctcagctcacttcaacctcctcctccttggttcaagtgattctcctgcctcagcctcccaagtagctgggactacaggcatgcgtcaccacatctgactaatttttgtatttttagtagagatggggtctcaccatgttgggcaagctgatctcgaactcctgacctcaaatgatccacccacctcggcctgccaaagggctgggattacaggcatgagccaccgtgcctggccaggaggattgtttgagcccaggagtttgagaccagacaaggcaacatagtgagaccccatctctacaaaagattaaaaataaattagccaagtgtggtgaggggcacttatactcccagctattcaggaggctgaggcaggaggatcactggagcccagcctgggcttctgaaggagacatgactgctaaggtcgaggcagtagtgagctatgattgtgccactgcactccagcctggggtgctgagggagacttgacacagacaggagagtgagactctggctcaaaaaaaaaataagaaagaaagatatatcaggctgggagcggtggctcaggctgggcacagtggctcaagcctgaaatcccagcactttgggaggccgaggcaggcggaccacaaggtcaaaagattgagaccatcctggccaacatggtgaaaccccgtgtctactaaaaatacaaaaattagctgggcgtggtggcacgcacctatagtcccagctactcgggaggctgaggcaggagaatcgcttgaacccaggaggcagaggttgcagtgagccgacattgcgccaaggcactccagcctggcgacaaagcgagactccgtctcaaaaaaaaaaaaaaaaaaaaagggaagggaaggggaggggagggaagggaagggaagggaagggaaggtctctctgattattggtggggatgcagactgtggaggcaaaggggagagcagagaccagggaagtggtgccaagatgggtcagaggggagggggagcaacagtgtgggtatgagaaagggatgggaagtaagagaatgtggctgttatatgaccaccaaagtggtggcctaaaacaacagaaatgggcgggcaagggtcatgcctggaatcccagcactttgggaggccgaggagggcagatcacttgaggtcaggagatcaagaccagcctggccaacatggtgaaaccccgtctctactaaaaatacaaaaattatctgggtgtggtaatgcatgtctgcagtctcagctactcaggaggctgaggcaagaagatcacttgagcctgaaagttggaagcagtagtgagctatgatcacaccactgcactgcagcctggacaacagagagagtctctctctaaaaaaaaaaaaaaaaagaaagaaaagaaaaagaagaaataggttcagcagaacacagattctagaaagaaaaaagaagcaaataaaaaataattttaaaaaataaaacagattgatttgaaggagtgaagaagtgtggtggcggatgcctgtaatcccagctactcgggaggctgaggcaggagaactgcttgatgaacccaggaggcggaggttgcagtgagtcgtgatggagccattgcaatactttgtctcaaaaaaaacaaaaacaaaaacaaaaacaaaacaaaacaaagcaaaataaacagaaatgtattctctcacagcgtagaggccagaagtccaaagtcagtgtcactgggctgaaagcaaggtgtgggcagggctgtgttcctttgggaggctctgggggaaaatctgttcctctccaattccagcttatgggggctgctggcagtcctgggcttggccacatcacgccagtcttcaaggccagcatctccacatctctgctctgcctacacagcaccttctgtctatgtcaagtctccctctgcctccctcttaaagggcacatgtgatcatttttggaacccacctagataattcaggagaatctacctcccctcaggtcccccttctttttttgagacaaagtctcactctgtcacccaggctggagtgctgtggcaccatcatagttcactacaggcttgacctcctgggctcaagcaatcctcccacctcagtctcccaaatagctgggaccacaggtgcacaccaccatgcccagctttttttttttttttttttttttttttgagatggaatcccactctcgccaggatggagtgcagtggctccatctcggcttactgcaacctccacctcccaggtccaagcgattctcctgcctcagcctcccgagtagctgggattacaggcacatgccaccatgcccagctaatttttgtatttttagtagacacagggtttcaccatgttggccaggatggtctcattctcttgacctcgtgatccgcccacctcagcttcccaaagtgctgggattagaggcgtgagccaccaaacccagctttttttttttttttttttttttttggagagagagtgtctcattttgttgcccgggctggttcaaactcctgggctcaagtgatcctcccacctcagcctcccaacaccctgcgattacaggcatgagctaccgcacccagccagatccccatgttaagatgcttaactcaatctcatctgcaaagactctttttccttctacggaactaggatctctttggggaggcatgattctgcctccctcagcagagtggacagaatctgagggtggataatttacaaatctgactgtggagtgtcaagaatgaggatgatgccagggtctgtaaccagagcaatcagaggcccctgagacggggccgcatgagaaaggggcaggttagggagaggccaggagatccagaggtgttgggtctgagatgcgcatcagacatccaagtgttgttgctgggtgagtctgaaggtcagagaagaggtcaggctggagagaattttggaagaccattgatggtacctaaagtcatcttctccatgcaggcattctccccaggggagctcactcagccttctcactttaggtaacatcaacagtcttccaaaagttggagaccccggctggccagcattgacaggagagagagtgaggaggaaccaggtgagaacgaggccggagacagaggaggcaggaggtgagaggaggccagagacagcggccctgtaaagaaaacattcaggctgttggccgggcgcggtggctcacgcctgtaatcccagcacttggggaggccaagcgggtggatcacaaggtcaggagttcgagactagcctggccaatatggtgaaaccctgtctctactaaaaatacaaaaaattagccgggcctggtggcgggcgcctgtagtcccagctactccagaggctgaggcaggagaatggcgtgaacctgggaggcggagcttgtagtgagccgagatggcgtcactgcactccagcctgggcgacagagcgagactctgtctcaaaaaaaaaaaaaaagagagaaaacattcaggccggcatggtggctcaagcctgtaagcccagcactgggaggctgaggtggaaggatctcttgagccaaggagttttcaagatcagcctgagcaatatattgagaccctcatctctacaacaaataagaaaattagcagggcatggtggtgcacgcctgcagccccagctaccggggaggctgaggagggaggatcacctgagcctgggaggtcaaggctgcagtgagccatgatcacgccttgcgccactacactccagcctaggcgacagaatgagattcttttaaaaaaataaatataaggccgggagtggtggctcacacctgtaatcccagcacttcgggaggccaaggcagatggttcaactgaggtcaggagttcgagaccagcctggccaacatggtgaaaccctgtctctactaaaaatacaaaaaattatctgggcgctgtagcagacgcttgtaattccagctacttgggaggctgaggcaggaaaatcacttgatcctgggaggtggaagttgcagtaagccactatcgtgccactgcactccagcctgggagacagagcaaggctccgtctcaaaaataaataaataaaataaataaacattttataaaaagaaagcagacgggcgcggtggctggctgggcgcggtggatcatgcctgtaatcccaccactttgggaggccaaggcaggtggatcacaaggtcaggagatcgagactagcctggccaatatggtgaaaccccttctctactaaaaatacaaaacttagctgggcatggtggtgcgtgcctgtaatcccagctactcggaaggctgaggcaggagaattgcttgaaccagggaggtggaggttgcagtgagccaagatcgagccactgcactccagcctgggcgacagagtaagactctgtctcaaaaaaaaaaaaaaaaaaaaaagagaaaagaaaagaaaatattcgctgggcacggtagcttatgcctgtaatcccagcactttgggaggcctaggtgggtggatcacctgaggttgggagtttgagaccatcctgaccaacatggagaaacccaatctctactaaaattacagaactgccgggcgtggtggcacccgcctatgatcccagctactccagaggctgaggcaggagaatcacttgaacctaggaggcagaggttgcgatgagctgagatcacgccattgcactctagcctgggcaacaagagcaaaactccatctcaaaagaaaaaagaaagaaagaaagcattcaggggagtgggagccagtgttgcaccggatgtagctgagaggtcaagacaagcaggaggtgtgatgttggacccaacaccatggggaccccgacaagagcatttccagagtaggaacagcaagatgtgaacatttgattggaaatggtgtaagagagaactgagaacgtctcttgtgagaaattttgctgtaaaaggaaacggagaaatggggctggagctggaggaagtccagagagtttttgttgtgattttgttttaatgtggaagaagtgacgatgtgtctgtgtgcccgtgggaatgagtacgtgggggctggggacctgctggagcaatgaccttcaggaagcaagagaaaatggggaaaataggccaggcacggtggctcaatttgggaggccgaggtgggcagatcacttcagcccaggagctcgagaccagcctgggcaacatggcaaaaccccgtctctacaaaaaaaaaaaaaaaaaaaaaaaaggtagccgggcatgatggcacgtgcctgtaatcccagctactacttgggaggttaaggtgggaggatcatctgagcccgaggaggttgaggtttcagggagccatgatggtgccactgcactccagcctgggtgacagagaccccatctcaaaaaagaaaaaaaaaaaaaagaaaatgggggaaatccccaaggggggtgacgttagagacagctgatccatcccaacaggacccaaaagcacttaccagcacagaagccaggaggtggggcagtcggcaggagacgagggaattagggtgttctcttctagtgaagcttgtgagcaaggatggggaaaggagagagacacacttggaaccctcactatgagcaagggaggtatggagcgtggctcccaccccagtggacgcctggaggggagggtcaggaatttaaagtgaaaacttgtgtttcctccaaccatgctaaccaatgagggcacacacttgcagaagacagagagttgccagcactttgggaggcctaggggggcggatcacctgaggtcaggagttcgagaccagccaggacaatatggcaaaaccccatctctactaaaaatacaaaaattagccgggcatggtggcacacgcttgtaatccagctacttaggaggctgacgcacaagaatcacttgaacccggaaagcagagattatagtgagtcaagattgcgccactgcactccagcctgggcaaaaagagtgagactctgtctcaaagaaaaaaaatacaaggggaagggaatgagacaccaccttttgatgggagagtgagaaataatttggcatgtcacagtgatattctcttccattttccataatcaactccattggtgttttttgttgttttttttgtgttttttgagacggagtctccatctgtcacccaggctggagtgcagtggtgtgatcccggctcactgcaacctccacctcccgggttcaagcaattctcctgcctcagcctcccgagtagctgggattacaggtgcatgccaccacgtcctgctaattttttgtattttagtagagacggggtttcaccgtcttgcccaggctggtctcaaactcttgagctcaagcaatccacctgcctcggcctcccaaagtgctaggattacaggtgtgagccactgcgcccagccaactcaattgttatactctacatttaggtctttattctatctggagtctatttttgtatgtgctgctacatagggacactttagtaggattatttttaaattttttaaaaaatttcaatagttttggggtacaggtggtttttggttacatggataagctctttttttttttttttttttgagatggagtcttgctttgtcacccaggctggagtgcagtggcgcgatctcggctcactgcaagctccgcctcccgggttcatgccgttctcctgcctcagcctcctgagtagctgggactacaggcgcccgccaccatgcctggctaatttttttgtatttttaatagagacggggtttcaacatattagccaggatggtctcaatctcctgacttcgtgatccacccgcctcggcctcccaaagtgctgggattacaggcgtgagccaccgcgcctggcatggataagttctttagtggtgacttctgagattttagtgcacttgtcactggaagagtgtacactgtatccagtatgtagtctttatccctcaccacctcccaaccttccctgccccaagtcccagagtccattatatcattcttatgccattgtgtcctcataccttagctcccgcttacaagtgagaacatacggtttgtggttttccattcctcagttactttacttagaataatggcctccaaggctgggcgcggtggctcacgcctgtaatcccagcactttgggaggccaaggtgggtggatcacatgaggtcaggagttcgagaccagcctgaccaatatgatgaaaccccttctctactaaaaatacaaaaaaattagccgggcgtggtggttcatgcctgtaatcccaactactcaagaggctgaggcaggagaattgcttgaacccaagcggcacaatctcggctcactgcaacctccgcctcctgggttcaagcaattctcctgcctcagcctcccaagtagctgtgattacaggcatgcaccactacactctgctaatttttgtatttttactagacatggggtttcaccatgttggttaggctggtctcgatcgcctaacctcaggtgatccacccgcctcagcctcccaaagttcatctggaattttgatgaagattgctgtgggcgggcacagtgggcagcagcgagacttcgtctaaggaaaaaaaaattaggtgtgatgacacgtgcctgtagtcctagttacttgggaggctgaggtgggaggatcacctgagctcaggagtttgagggtgcagtgagctatgatggttccactgcactccagcctgggcaacagagtgagaccgtgtctcaaaaaaaagttctgcccatcaaccaatgagtgcataaaggaaatgtggtacatatacagccgttaaaaggaatgaaatcatgtattttgcagccacttggatggagctggagacattattcttttttttgtttgtttgagaggaaggtcttgctctgtggcccaggccagagtgcaatggcaggatctcggctcactgcaaactcttgggcagatcatgaggtcaggagttcgagaccagcctgaccaacatgtcgaaaccccgtctctactaaaaatacaaaaattagccgggcatggtggcgcgtgcctgaaatcccagctactgaggaggctgaggcaggagaatcgcttgaacccgggaggcggagattgcattgagccgagatcatgccactgcactccagcctcagtgacagagcgattctcagtctcaaaacaaacaaacaaacaaaaaccacttcaagccgggcatgatgcgggtgcctgtagtcccaggtactcaggaggctgaagcaggtaggatcgcttgaactcaggatttcgaggctgcagtgagctatcatagtgctgctgtgctccagcctgggcgacagagcaagacccctttctaaaaaaaaaaaaaaaaaaaaaaaaaaaagataagatatgaaaacaaaacagccgggtgcggtggctcacgcttgtaatcccagcactttgggaggccgaggtgagtggattacctgacgtcaggagtttgagaccagcctgactaatatggtgaaatcccgtctctactaaaaatacaaaaattagccaggcatggtggcgcgtgtgtagtcccagctactcaggaggctgaggcaggagaatcgcttgaacctgggaggtggaagttgcagtgagccgagatcgcgccattgcgctccagcatgggggacaagagcaaaaactctgtctcaaaaaacaaacaaagaaacaaaacagaaaaagtaaaaaggagaaacgaaaattaaaaaaaaaaaacaaaacaaagaaataaaataaaataaaaccaattcacatagccacgagggggcgctgaggcctcacgtccacacgtagagggctgcggtgcttggagacaacgtggccacctgggagtacggttcttgggcaagcgcctactgtgcgcccggcgccgttctacacaggaacacagcgcttttcaaggtaggcgaggagctaatattctgaagatggtggtggggggcggtgaacagacaatagaatagacagaccagagtgtaatatttttttttttgagatagggtgttgctgtgtttcccaggctggagtgcagtggtgcaatcatagctcactgcagcctcaaactcctgggctcaagcaatactcccacctcagcctccagagtaactaagaacacaggcatgcaccaccacgtctagctaattttattttttgtagagacagggtctcccctgggctggtctggaactcctggcctcaagtgatcctcctacctcggccactcaacgtgctaggattacaggcatgagccaccacgcctggccaataaattctataaaaaaataaataaatcagcagggcacggtggctcacacctgttatctcagcactttgggaggccgagacaggtggatcatgaggtcaggagttcaagaccaggctggccaggatggtgaaaccctgtctctactaaaaatacaaagaaattagctgggcgtggtggcaggtgcctataatcccagctactcgggaggctgaagcagagaattgcttgaacccaggaggtggaggttgcattgagtagggatcatgccactgcactccagcttgggcaacagagtgagactccgtctccaaaaaaattaaaatcaatcaatcgatcgatcggtcaagtgacaggatagtgactgagggtgctccttagattaggtgctgcagaacacctctctgagatgacatctacatgatggtgaggatgagagaaacacggggagaactgcaggcagaggcaatgtggccacgggtcatggaggggccggtaggtgggtctgaggacgggagagaagctggtgtgggtgagggtcagacagcagagggctgaaggcaggaaggtgacagggcgcagtgtggccaggaggactaccaaggaaaggctgtgaaaagtggtgactgtgaaaagtggtgacatgaaatgtcttcaggatgggttttaattttttatttatttagtttttttgagacggagtctcgctctgtcacccaggctggaatgcagtggcgcgatctccactcacggcaagctccgcctcctgggttcactccattctcctgcctcagcctcctgagtagctgggagtacaggcacctgtcaccacgcccggctaattgttttgtatttttagtagaggcggggtttcaccttgttagccaggatggtctcgatcacctgaccttgtgatccgcccgcctcggcctcccagtgttgggattacaggcgtgagccactgggccctgcctccccgccccccgccccgagacggagtctcgctctgtcgcccagactggagtgcagtggcatgatctcggctcacttcaacctctgcctcccagattcaagcaattctcctgcctcagcctctggaatggttgggactacaggcatgcaccaccacatccggctaattttttttttctgtatttttagtagacacggggttccaccacattggccaggctggtctcgaactcctgacctcaggtgatcctcctgactcggcctcccaaattgctgggatgacaggcatgagccagcacacctggcccagggtaagttgttaaatggccggcaaggtgtctcacgcctgtcatccctgcactttgagagactgaggcgggaggatcacttgagctcaggagtttgagaacagcttgaccaacatagtgagacctcatctctacagaatatttaaaaattatctgggcatagtggtgcacacctatagtcccagctatgtgggaggctaaggcaggcggcttgcttgagcccaggaattagaggctgcagtaagttatgattgcaccattgcattccagccggggtgacagagtgagactgtctctaaaaaaaagtaaaattaaaaaaagcaaagagtaatgttcggaatgtctgccttgttggtacaaaaggggtgactagaacatagcttcacacttgtttgtatttgcagaaaaaaatattgcagtaatactaagaaattgattttctttttaaaatggtaacctttggaggaaagaggaagagagaacagggtggatggaggttagggtgagagtgagaaaaggcgttgtctggctgctgagtgggaaacggaccacagacggtgggaggcaaggagccagctgggtggggaggctagtgtggctacaaggcggggagggcggcgcatggtgggttaagtacactgtgtcttttggggctttttttttttttttgaggcggagttccgctcttgttgcccaggctggagtgcaatggcgcgatcttggctcactgcaacctctgcctcccgggttcaagctattctcctgcctcagtctcccgactagctagaattacaggcatgtgccaccatgctcagttattattttttgtatttttagtagagacggtgtttcaccatattggccaggctggtctcgaactcgtgacctcaggtgatccacccgcctcagcctcccaaaatgctgggatcacaggtgtgagccactgctcctggcccctttggggcttttctgtatctgaagagctgtggttcagtgttcctaagggacttcctgctggccagaaatggtgaccataggagctaatgatcagtcccctccttacaatgacagggttgataacagtgcttaccatgtgcctgggcctagcgtattctctgcatttaaacctcacaacaggctgggcgcggtgtctcccacctggaatcccagcactttgggaggccaaggcgggtggatcgctggagcccaggagttcgagaccagcctgggcaacatggtgaaatcccatttctacaaaacataccaaaatcagctgggcttggtggtgtgtgcctgtaatcccagatgcttcggaggctgaggtgggaggatcatttgagcccctgaggcagaggtagcagtgagccaagatcacaccactgtaccccagtgtgggtggcagagtgaaaccctgtctcaaaaaacaaaataaaacaaaacctcacaataatccctggaggtaggtactattaaaatcaccttcattttacagatgtggacacagacacagagaagttaggtgactttctcaagatcacacagctaggaagtgccacttgaatccaggcagtaatccaaaatccatgttcttaaccactaaccactgtggtgtgccgtttcccaattcttttcctttttttttttttttttttttttgagacagagttttgctctgttgcccaggctgtagtgcaatggcccaatctcggctcacggcaacctctgcctcccgggttcaagcgattctcctgcctcagcctcccaagtagctgggattttaggcaagcgccaccacgcccggctaattttgtatttttagtagaaacggggtttctccatgttggtcaggctggtctcaaactcccaacctcagatgatccacctgcctcggcctcccaaagtgctgggattacaggcgtgcaccgtacccggcccttttttattttattttattttttttttgagacactgcttcgttacccaggctgcatgcagtggtgtgatcgacctcctgggctcaatcctgtgaccttggctgggattagagacttgagtcaccccgcctggcctcccagtccttcactgtagcattgttctcagttaattgtattgccctttagattggttatctccacggattgcgagcaatcatgaagaccttagtatgaattagccaatattttcccatcactgaacaatagcaattgttgctgtggtttaaagggaccctgtagagcaggagttaaatagttgggctctggagtcataatgcctgggactgaagcccagcaccaccatttcccagccatgtgactttgaacaagtgacatccctaatctgggcctctgtttcctcatctgcaaagtacccattttccagatgaggatactgaggcctaacacacgcacacacaggactttagaacctgggttttgagcgcataccgcctccaccaggacaaggaacccaaacgagattctgtgagagggaagtagaaagggttctgcaggcccaagtggggtgttctaggacacgggcttaggagctgggatgtcagcaggagggacttgcccattctctatacagtgtggaggaaagggagcactggaagccttgggtccatctgcacagagacagcaaggtcacctgaacggctggacaggccagggtgctcctggatgctcctcctcaggggggtcttctcttcctcccagactggagctcagacacccgggataagtgcttaatcctggcggggccacttaatggcacaggtggggacagggccctggggccccaacttcagtcagtggaggccacgtgggagatgtactttgtccttggtgagacagcccagctctgaccctgccctggtcctaagcacggccacagccccaccccagctcctgattatacacacctgggaccactggtccaaccagaaccattagaatgtagccgtgccattaaaggccattaaaaggcctggcatggtgtctcacacctgtaatcccagtactttgggaggccgaggcaggtggatcacgaggtcaggagttcaagaccagcctggccaaggtggtgaaaccctgtctttactaaaaatacaaaaattagccaggtgtggtggtgcacgcctgtaatcccagctattcgggaggctgaggcagaagaatcacttgaacccaggaggcagaggtttcagtgaactgagatctcgccactgcactccagcctgggtgacagagcaagactccatctcaaaaaataaaataaaataaaataaaataaaatgttgaaatataggccaggcctagtggctcacacctgtaaacccagcactttgggaggctgaggtgggcagatcacttgaggtcgggagttcaagaccagcctggccaacatggtgaaaccccatctctgctaaaaatacaaaaagtagccaggcatagtggtgtgcctgtaatcccagctacttgagaggttgaggcaggagaaatcacttgaacttgggaggtagaggctgcagtgagctgagatcacaccactgcactccagcctggatgacagagcgagactctgtctcaaaaaaaaaaaaaaaaaaaaaaaatacggctgggcgcggtggctcacacctgtaatccctgcactttgagaggccgaggcggtcagatcacctgaggtcaggagttcaagaccagcctgaccaacatggtaaaacccatctctactaaaaatacaaaaaattagccgggcatggtggcgcatgtctgtaatctcagctactcaggaggctgaggcaggagaatcgcttgaacccaggaggcagaggttacagtgagccgagatcgcaccattgcactccagcctgggcaacaagagcaaaacttcatcttaaaaaaaaaaaagaaagaaagaaagaaaaaaaagacaatgttgaaatagagggctgggtgtggtgggtgaattgcttgagcccagaagtccaagaccagtctggacaacataaggagaccttgtctctacaaaaaagtaaaaaaatagccagccatgatggctcacacctgtaatcccagcattttgggatgccaagttaggaggatttattgagcccaggaggtcaaggctacagtgagctatgattgtaccactgcactccagcctgggtgacaaagtgaggctctgtctctaaaacaaaattaggtcaggcacagtggctcacccctgtcattgcagcactttgggaggccgagacaggctgataatttgagcccaagagtttaagaccagaccggacaatacggcaagatcctgtttcttaaaaaaaaaaaaaaaaaaaaaaaaaaaaaaaaaaaagccaggcatggtggtgcatgcctgtagtcccagctacttgggaggctgaactgagaggatcacctgagcctgaggaggtcaaggctgcagtgagccaagattgcaccactggactccagcctgggtgacagaatgagaccctgtctcaaaaaacaaaataattttttttaaacaataaaattaaaaaacataaaataaaattttttttaaaaagccactacccacttctgatggcccagctgctcccttgggaccctccaggcctctccatgccccagcatgaaaggattaacctgggttcaatagggggcttccctgatccagctctgggggccattgtccttcctgactggtggatggccctggcaatatttggtgttttccctggctctgccccaatatcaatccctccacccataagttcagagtcctcagagaagggtatccatttcacagaactcctatgcatccttcaaagcccaccttaatgccacttccttcaggaggccctcccagatttcttcaccacccccagagtgaatagctccctcccctctgccaagctcccaggtatcttgagccattcagcacactttgttctgattctcacactcaggcccttctccccccatagtgtgtgagcaccttgatgccagagaccatcttcctctcatctttgcagcctcagtaccaagggccattataagcacagcgcagatttcatggagtggctgaatgatttgtttgctgtgtgatcacctgtactgagtcaatatcggtcacctttggtcatgagcatgccccttgacccagattcctgcaggagcctgcatataggggccctgcttgctgggactggggatgggggtggggtggggagttcaagggaaggcaaggtctaggatataaatcccaagggcgtgggctcagcagggcccgttctcatgctttctggcccgggaggagtgattctccatctggcaggcccagctgcagtgctgggacagggacatgagcagaggccacaggaggagagagggaggttgtggggggagctcggggaagcccatggtaacccggggggaggaaaaacagccacacagtgttattgttacagaaccattaaatacaacttatacacaagcaagctgggcggcgtccggggggcagggagagtgcaagagggtcaggggtgagcagtccgggcccggtcctggagggggctgaggctgccgtcgtgggaggggcttggctggcggaggccgggctgcctgtggaggccttgaagctttgccagcagctcctggatgaagtcctgagacagggtgggggagctgagaacatgggaacagtgcgggggcaccctctgcccctgtccagcccagtccctgacctgggcgcctcctcctgttctctgattgtggggtggggggagttaggggcggaggctatagacatagagagaaaagtgagccgggagaaagacagagatggggaaagggcgatgggagggatggagagaaagagctaggaagagagatagagatccaaggagacagatacggagtgggggagggggagaaacagacacagaaacagagagacatgtagagatagagacagagagagacataaggacagagaaagaaacagagacatgtggagacaggtccccagagatagatccagggcgaacagaaatgcaatgacgtttgtccctagagctagttggagaaacatgaatagttttcccttttaaagcagggaaggaagtgggaggggttgggccgctcagcttcagggcctgggaggatggagggcccccagaggtggggaagggagcccggggtggcggaggcagtgacaggggaggacagagggagactgagcccgaaggctggtggccaaaggacaggcacaggagaggcaaaaacagggcagatgggggaggacagaatggagccccctcagcagatgggggagagagggagagagacaagtaggaggacaaaagacacccctggagaccagaaagagctgcggagggcaggttggggccgggggtggtggggccgggtggtgttccccagagacccttctgccagcttcttccccctcccccatcagagtacttggggccagaacagggagagaatgagggagagaaaactcacctcgacaggtttcccacatgacttcaggagtccctaaaacccccaaccaagaacaaaacaaaacagtaaatgactaacacctactcccctccagccccttccctttcccaaaaggccccagcagcaagacaaatggaagtcagactccagggtggactgcccaccaagcttcaagagaggaacagagcccaaggggcatgtggatcgactcagggcaggggtgagttactagatccagagagggcgagagggtcacacagcacttccctcctctaaaaaggtataagccataagcaaagacatggctgccaaactgcctgggttcgatgcccagctctgctccttctgagctgtgtgacactgggcaagggattcaacctctctgggcctcattttcctcatggggaaaatggagctcacactagcgcctgcttcggagggttttgtgagggttaagtgagtgaatacatgtaaagccatcacaccagtgcccggcatctagtgagcactcagtaaacacgtgaactattgctattatttttagggaggtgcaaagtgggaggctgggggacacgtccccccacctacctggattttccggcttctctcctcttcactctctaactccaacaattcatcaatgttgatctcatcgggcatgtctgcctcctagggccagggagggaggggtgcttaggatccccttccctccctccctcgcctttgtccagggctctgcaggagccccaccggccccagggcccagctggcgggttctggagcattaatgtggcagtccgggacagcactgccaagacgggacatctgggtgttgggggggaggggtgacagatgggctgagagagccccggggccctgtaccagcccgatgcctgggcccatgggccccgggagcctcggggctggcacgggtctctcgccttggctctagttcccacagaggaaaacaggcctagtggagtcctggaatgtcagattctgggattcgggagaggagctggcttctgccctttcaaggaaaagtcttagcactaggtgcaggggaggagaggctggcagccagcagccagctggggcggccccttcccccaggggacaggaagggaggggacaggaagggaggggacggcttgggccagcccccagagggccaaaatgcagcctggtgagaccgaagggaggaccaccgaggcccctcaaggtgggtgggtgggatgagtcatggctcaactcagctgctaagagcggggcgctgagtgtggcctctacaggcagtggcccaagcgcaggctggctcagtacccctgctgggaataggacccagctgtccccagctgtcgagggagcaagagagccttggggttatgaatcctttcctccccaacccaaagtccggctgtcggcttcaggcctggggcttcagggctggatggtcctggttcatgtgtggtgaaggggcttcagcaaggacacaggtgtgtgagtctctgccagggccacagcctgatgccaagggcctggggctggccgaggatgcagagggacctggcatcgtgcagtggcttcgtatagtggactgtggtcctgcaggtgtgaggtgtgtggctctggcttgggtgtgtgacacatcagcatgtgtccacagtcagctgtggggcccaccacctgagaatggcctcatagatgccacctgccactagcaaccagattggttcacctgtatgggcccaggtgtgagtctgagaacagagggactgcatgtcaccatgggagaagggccatgccttccaccattgtcgcaccatgaagaggaggactcgtgggtcctgtgtacactgtagcatacagaagtcacagaaggccaggcgcagtggctcacgcctgtaatcctgacattttgggaggccgacaagagagaattgcttgagcctaggagttcaagatcagcctgagcaacatagcgaggccccatctctttttcttttttcttttttttgagacaaagtctccttctgtcacctagggtggagtacaatggcgcgatcttggctcactgcaacctccgcctcccgggttcaagtgattctcctgcctcagcctcccaagtagctgggattacagctgcctgccaccatgcccggctaatttttgtaattttagtagagacagggtttcaccatgttggccaggctagtctcgtactcctgacctcaagtgatctgcccaccttggcctcccaaagttctgggattacaggcgtgagccactgtgctcggccaatgaggccccacctctaaggaaaagaaaaaagaagtcactgaaagtgtgacttcaagcagaaactcaagtgatgaagtacctgtgtgtgtcaatacatgtagctgtggcttaggctcttgtgtgcctgtgagcagcggtgggttctgcagttgtatgtccacctgttcctatagcttacagttttttgtttgtttgtttgtttttgagacggagtttcgctcttgttgcccaggctggagggcaatggcgggatctcggctcaccgcaacctcctcctcccgggttcaagcgattctcctcccgagtagctgggattacaggcatgtgccaccacacccggctaattttgtattttttagtagagacgggatttctccatgttgatcaggctggtctcaaactcctgacctcaggtgatccgcccgcctcggcctcccaaagtgctgggattacaggcgtgagccaccgtgcccggtgcttacacagttttatgtctgggtgtagttataaattctgttgggttttgtttgtttttgagacacggtctcgctctgttgcccaggctggagtgcagtggtgcaatcttggctcactgtgaccttggcctctcaggctcaagcaatcctcccacctcagcctcctgaggagctgagattacaagtgcgtgcatgccaccacgcccggctaagttttaagatttttggtagagacaggttttccccatgttgcccaggctggtgttgaactcctgacgtcaagcaatcctcctgccccggcctcacaaaatgcgtgagccactgtgctgggccaatttctgttgttttatgtctttgagtggctgcggatcagcgcttgtgcttgaaggtggtcagttttttctttaggagataaggaagggccgtaacttgagtcattttgtgttccagtggggttgtgctgtgtctgcctacggctgtggcccatgccgctgtgtctgcgggtggctgtgactgtagcatatgttgaactgtaggtgacccccccccagcccccgcttgtgtccttgtgggtttgtgcatggctgttacttctgggctgtgtccgtgagtggctatagcttccttcactgtgcacatctgtgtctgcttttgcttcctttgccgtgggtctctgtgtggctgtatctcccctgtcaccatgtctgtgtttggctttatgacaccccccttcccccactctttctccagacgtggcggtttcagctcaacttagcctcctccctcctcatgctaaacccctggccctccacaggcgtttggacacatctctggagacccaagtctttgtgtgttgctctcggtgtgtccacaagcacaatgccatagagcacggatggccaggccaatgagtgcccggccctggggcgctcgtcctcttgtgcagaccaggctggccgtgcaccagcgagtgtgcaccgagaccccaagggcgtggggtctccgcgcccgggctctatctgtccccgaccacccccgagccctccccgggctcaccatgccgcggtacagctcctccaggcgcccgtcgatccacttctccacgtccagccgccgctgcagctcccgccggtcatacttgacggtgacgcgcgcgtgccgcttctgcagccccccgggactgccccctggcccgcgggcccgcgatggagactgcagcttgctcagcacgcgcttgcccagccgctgagctgccatcgcgctgctggacccagcctggccccgcgctgtgcgccttcgcctcgcgccccgggtgcttcttacgggccagggcggggctagccgggggcgggggctcgggctcgccgggaggtctgccccaccccggccgcctcaggcctcagtttccccgtctgcagtgcgagagtaggccgctgcgtcggcttgaggcacgcagtcgtgcgaagttgaggtatgggcggggacccagagtcccgggcgggtccctgcatcgggggctcccgggccgggatcctgtggggcgggggcctgggacagacactcgggacccggcctgtctgcgccctctggcggtggcggggtggggggctgttggtgcgggagcgcctgcgccgctgtcgctgtagaaggtcgagcggtcacttgttccttcgttcattcattcactcatccatccatttgtttgttcactcattccgttcaacgaatttttttttttttgagtcgatgtctctctttgtcgcccaggctggagtacaatggcgcgatctcggctcaccgcaacgtccgcctcccaggttcaagcgattctcctgcctcagcctccgaagtagctgggattacagggatgcaccacaacacccggctaatttttgtatttttagtagagacgggatttcgccatgttggccaggctggcctcgaactcctgacctcaagtgatctgcctgcctccgcctcccaaagtgctgggattacaggcgtgagccaccgccactggcccggttcaacgaatatctattaagtatccactctataccagacactgctttacgctccagggatagagcagggaacaaaacagacaaaaccagtcccacgcagttgacagttgtagccgggatacatgagaaacacagtaagtacggtattatacagtttattatcatataagtgctttggagaaatataaagcagagaaggagaaatggagtgagggtaaggttgcaattttagcgagggtggccagggaagtcccttacttcaaaacagtcttctcacttctaattataagcagcaataattatactctaaaatttaaatgtggctgggcgcagtggctcactcctgtaatcccagaactttgggaggccaaggagggtggatcacgaggtcaggagttcaagaccagcctggccaacatggtgaaactccatctctactaaaaatacaaaaattagctgggcctggtggcacatgcctgtaatcccagctactcggaaggctgaggcaggagaatcgcttgaacccgggaggtggaggttgcagtgagccaagatagcaccattgcactccagcctgggcaacaagagcgagactctgtctcaaaataaataaataaataaaataataataaataatttttttaaaaaggccaggcatggtggctcatgcctgtaatcccagcactttgagaggccgaggtgggcagatcacgaggtctggaattcaagaccagccaggccaacatgatgaaaccccatctttactaaaaatacaaaaaaaaaaaaaaaaaagccaggcgtagtggtgtgcacctgtaattgcagctactggggaggctgaggcaggaaaattgcttgaacccaggaggcagagattgcggtgagccaagatcgcaccactgcactccagcctgggtgacagagcaagactccatctcaaaaaaaaaaaaaaaaattgtagagacagggtctccctatgttgcctaggctgttctccaattcctgggctcaagcgatcctcccacctcggcctcccaaggtgctgggattataggcatgagccacctcactccaccagccagccataatgtaaaacttttgagtttcaaagaacatcatcaagaaagtgaagagacaacccatggaatgggaggaaaaaaattgcagtcatgaaactcataaggtgctgggacgagccaccacacctggccaaactatacactttaaaaaggtgagttgggccaggcacagtgactcacgcctgtaatcccagcactttgggagggcaaggcggatggatcatcggaggtcaagagttagagaccagcctggccaacatggtgaaaccccatctccactaaaaatacaaaaattagctgggcatgggggcacatgcctataatcccaactactcaggaggctgaggcaggagaatcgcttgaacctgggagggggatgttgcagtgagctgagatcatgccattgcactccatcctgggcaacaaaagtgaaactccatctctaaataaataaagggtgagttgtatggtatgtgagttatatctcaataagactgtgtttttttttttttttttttttttttttgaggcagaatctcgctctgttggccaggctggagtgcactggcatgatctcagctcactgcaacctctgcctcccaggctcaagcaattctcctgcctcagcctcccgagtagctgggattacaggggtgtgccaccacgcctggctaatttttgtatttttagtagaaacggggtttcaccatgttggccaggctggtcttgaactcctgacctcaggtaatccacctgcctaggcctcccaaagtgctgggattacaggcgtgagccaccgtgcccggcttcaataaagctgttttatttcaaaattaaaaacaggccaggcgccatggttcacgtctgtaatcccagcactttgggaggctgaggtgagtggattatctgaggtcaggagtttgagaccagcctgaccaacatggtgaacccgtctctactaaaaatgcaaaaaaaattagccaagcatggtggtgcacccctgtaatcccagctactcaggaggctgaggtgggagaattgcttgaacctgggaggcggaggctgcagtgagctgagatcgtgccatcacactccagcctgggcgacagagaaagaccccatctctaaaaaaacaaaaataaaaaacaactatccatagctacccatgaccttcagtctaaaggccaaactctggtttagcagtcccatctctgccagggacagtcccatttcagcaccagcacctttcactcgcagttccctctgccaggaaggttcttccctagaatatcatcagggctcactccttcacctccctccaatgtcactgttcagtgaggtcttccctggccacgctatttcacactgcaactctcgtgcccctcatccagctctgtttgatacataacacttaccactttctaacattatatatatatatatatatatatatatttttttttttttttttttttttttttttttttttttgagttggagtcacctcaggctggagtatagtattgtgatcatggctcactgcaacctctgcctcctgggttcaagagattctcctgcttcagcctcctgagtagctgggactacagttatacaccactgtgtccgcttactttttatattttcagtagagatggggtttcaccatgttggtcaggctggtctcgaactcctgacctcagacgatctgcccgtcttgacctcccaaagtgctggaattacaggcatgagccaccatgcctggcctctaacattatatataatgtactcatttaatgtattgtccatgccaggcgtggtggctcacacctgtaatctcagcactataggatgctgaggcaggaggagcaattacatccaggagttcaagatcagcttgggcaacatagtgagaccctgtcgctacaaaaaaaaaaaaaaaaaaaaaaagccaggtgcaatagtacatgcttgtagtcccagttactctggaggctgagttgggaggatcacttgagtccaggagatggaggacgcagtgaactgtgattgcaccactgcactccagcctgggtgatggagtgagaccctgtctcaaaaagaaaaatgtcatattttctgttctgtgcagtgacagaaaaaaaaaattattgtctgtttcccaactagtagcatactaaaggcagggggacaggactggtccactttgggtacaggcaaaaagagggtgcactgtctgtagagaatttaaaaataaaaagctgaccaaggccgggcatggtggctcatgcctgtaatcccagcactttgggaggccaaggcaggcagatcacctgaggtcaggagttcaagacctgcctggccaacatggtgaaaccccatctccataaaaatacaaaaattagccgggtgtggtggtacaagcctgtaatcccagctacttgggagactgaggcaggagaatcgcttgaacccgggaggtggaggttgcgatgagccaagatcgtgccattgcactgcagcctaggcgacagacagagtgagactccatttcaaaaaaactgaccaaaagttggtctaatttttattttactttgcagtgacatttctaaacagtgtcaatgataaaatagtcctccccagggaagaaacagaaacaaaaaccttttggtggtctgctttctaaacaattgatgcaatataaaaaagggggaaaaaaacaattgatgcaattactgtcggttttttttttgttttgtttttgtttcattttttgagacggagtttcgctcttgttgcccaggctggagtacaatggcactatctcagctcactgcaacctccacctcccaggttcaagcgattctcctgcctcagcctcctgagtagcgcggattacaggcatccgccaccacgcccgactaattttgtatttttagcagacaggatttctccatgttggtcaggatggtcttgaactcccgacctcaggtgatccgctcgcctcggcctcccaaagtgctgagattacaggtgtgagccaaccacgcctggcctactgtcaaggttttttttttggtgtttttttttttttttttttttttttttttgagacagagtctcgctctgtcacccaggctggagggcagtggtgcagtctcagctcactgcaacctccgcctcccggattcaagctattctcctgcctcagcctcccgagtagctgggactacaggcgcccgccaccgcgcccggcctctttttttttttttttttttttttttttgagaacgagtctcgcgccgtcgctcaggctggagtgcagtggcgcaatgtcggctcactgcaaactccacctcccaggttcaagcgattctcctgcctcagcctcccaagtagctgggactacatgcgcccaccaccacgcccggctagtcttttgtactttttttcagtagagacggggtttcaccgtgttagcccagatggtctccatctgctgacctcgtgatccgcccacctcagccttctaaaatgctgagattacaggcataagccaccgcacccggcccttcttttttttttttttttttttgagacgaagtctcacactgtcgcccgggctggtgtgcagtggggcgatctcggctcgccgcagcctccacctcccgggttcaagcgattctcctgcctcagcctctccagtggctgggactacaggcgcgcgccaccacgcccggctaatttttgtatttctagtagagacagggtttcactatgttggccaggctggtctcaaattcctgacctcgtgatccgcccacctcggcctcccaaagtgctggggattacaggcgtgagccacctctttttaatgaactctgaaggatgataaaggccaagggacaaacattccaagcatcaggaatgttgatgcttggaatgtttctcaggacagatatggagatgcccaggcctcccaaagtgctggggattacaggcgtgtgagcccggcctcttttttttttttttttttttgagaacgactctcgcgctgttgctcaggctggagtacagtggcacaatattggctcactgcaaaccccgcctgccgggttcaagagattctcctgcctcagcctcccgagtagctgggactacatgctcccgccaccacgcccggctaatctttttgattttttcaccgtgttagccaagatggtcttgatctgctgacctcgtgatccacccgccttggcctcccaaagtgctgggattacaggcatgagccactgcgctcagccctccttttgagtttttgtgtttaaagttcaaaactggacagatgcagtggctcacgcctgtaatcccagcactttgggaggtcaaggtgggcggatcgtgaggtcagaagttcgagaccagcctggccaacatggtgaaactccatctctacaaaaaatacaaaaattagctgggcgtggtggcgggtggtgcctgtaatcccagctactcaggaggctgaggcaggagaattgcttgaatccaggaggtggaggttgcagtgagctgagatcacagcattgcactccagcctgggcaacaggtgaaactctgtctcaaaataaaataaaataaagaaagaagaggcctataccttcttccaagccttgacggctcagcacatacttctctgttttcatgctcaagcctaggtttagtaggcctgagtggcagtgggagattcaagtgctgggggagacctttggcctcacattcagattccaccttgagtcccatgatctcattgcaaggttagacttccattgtttaaggtaaataccattttgataactcagttacggcttttcatgtattattatgctaggagggaggctgaagagtgggagtggccctggctcctgaacacactattctctttcctgcctgaaggcctccgcatgtgccattcctgattcttggaatgtttgtcccttggcctttatcatccttcagagttcattatcaaagccacccctcacaaagcccttcctccgccaccccattcaaaagatctcttgttattttccatcccagcccctgattccttttctgtatagcactgtcaaagtgttttcaggccaggtgtggtggttcacgcctgtaatacaacacttttggaaggatgagacaggaggatcccttgaagccaggagtttgagaccagcctgggcaacatagcaagtcccctgtctccacaaaaaatttaaaaattagctggatgtggtggctcacatctgtagtcccagctacttgggaggctgaggtgggaggatcccttgagcccaggaggtcaaggctgcagtgagccaagatcactccattgcactccagcctgggcaacaagagcaaaacttccatctcaaaaaaaaaaaaaaaaagaaataatctaaaagtgttttcaataataatgcatttatgttgattaccttgttggctatcctctactcgtgtgcctgccccactccattcccctttctagagtctgttcacgtaactcctcttccaggaagccctctttgactcccaggcttggtcaggtgtcttctctgggtttccccaggggcttccttcctctcaattctgatgctgcctgtgctaagtatttgtctccatatctgtcctgagaaccttggagccagggctcggggctgtttttgcatgggcctatcacctcctccaggaagccctccttggccctctctcaggctggatgggaaagctgtctgggctcccatcatgccctggttttctagcgacccagcctctgatccctaagcttggccttccccatcacagctttcatcactttgtgctaagcttccgctatcactactctgggccgttcctgtttggtgactcagggaccagtctggcatggccaccgctgggtccccagcattaagccctggagcatgagcccagtgaactttgaaattcaggaaggaattcacaggaaagctgcggcgaggcgggcagaaaaccacaggcttccaagaaacgcgtgtctgccgccccctcctcccaccctgaggccagtcctagagcgaaggccctcctccgacgtcgtcaccaagcccaagggaagggtggcaggtgctcagcgggcagacgccccgccccgccccgccaggttctgttgggggcgaggcccgcgcaagccccgcctcttccccggcaccaggggcgggcccaggtgcgcccagggccggggagcggccgcgcaggtgcctgccctttgcgcctgcgcccagctcgccctgcctagccaggtgcgccccgccccctgcctgcccggccaccttcgggagccgcttccaataggcgttcgccattggctctggcgacctccgcgcgttgggaggtgtagcgcggctctgaacgcgctgagggccgttgagtgtcgcaggcggcgagggcgcgagtgaggagcagacccaggcatcgcgcgccgagaaggccgggcgtccccacactgaaggtccggaaaggcgacttccgggggctttggcacctggcggaccctcccggagcgtcggcacctgaacgcgaggcgctccattgcgcgtgcgcgttgaggggcttcccgcacctgatcgcgagaccccaacggctggtggcgtcgcctgcgcgtctcggctgagctggccatggcgcagctgtgcgggctgaggcggagccgggcgtttctcgccctgctgggatcgctgctcctctctggggtcctggcggccgaccgagaacgcagcatccacggtgagggccgggcgggtaggctggaggcggggcgcagggggcagaggctcgggggtcaacgggggtctgagcagggagaactggcgggggaggaaactgggggctacttgatggcgttcagcgggtgtggtggaaccagccctggaggattgagccttgaaatgaggtttgggagccttcgacagcgaagacgggcggaggagcgagggttaggagagtttccttcgggtggaggaagagtcaaggggtattgaccaagaaggcgtggcactgccccttcctgtggcaagaacggggtgaggagccgaattgaagaccagccttctcctggcggtggaaagttccatggccaaagctcagggagaggccaggcctgtgagatggtgggggttgggttgggtgacctggtggccgttttagactcggaagaagcccatctcacccctgcctctttggagattggacaagagcctcccctgaagtttttgtagttgagttgcagtaaagtaggtgcccgagaaggagggagcaagaaaggaaacaagctttggggaagaggaagctctgctaaggctcgagagagtattggcgttgagcagctggtgttggggtctttggattggcccttagaagtcggtggtgaataaggtgatttaaacttctacactcttaaggaagtgtggtctgaaaggtctctttgaacaagtgttgttataaccttaactgcttcagacaagcaccagcgtgttttgaaaagagctctcttgaaagcaagaattcattgattcagcaaaacttactgaggccctgctacgtgtcaggcactggcgctggttataacagttaactcagactagctgggttcctgcattcacagagctaatattccagtgggagaggcagagctagtgaaggtttaaaaagcacttgccatgagattaagttactgagaattaaatgaaccaggtgaagtacaccaacagggtgacgtaagatgttgggggcggctttagctcaggtggtcgggggacgtctccgtgaggagggtgacatctgagctctaacatgaagaatgaggcagtagccacacggagacctgggggaccagtgtccagttgcaggcaatagagtacaaaggccttgaagctggaacaagcttggttgggttcagggaaaagacagagccagcctggctggagcaggcgtgaaggaggggaggactggaggaggatgggaggtgggagaggttggctgcagccagatggcctagggctttatagacaggtgctggtgcttgaacccgggaggcggatgttgcagtgagccaagatcgcgccactgcattccagcttgggcaacaagagtgaaactcccatctcaaaaaaaaaaaaagaaggccgggtgatgtggctcatgcctgtaatcctagaactttgggaggccaaggcgggcagatcactggaggccaggagttcaacaccaccctaggcaacatgatgaaaccccgtctctaccaaaaatacaaaaattagctgggcatggtggtgcacacctgtagtcccggctactcgggaggctgaggcaggagaatcgcttgaagcccagaggcggaggctgtagtgagctgagatcaagccactgcacagcagcctgggcgacacagcaagactcagtctcaaaaaaaaaaaaaagagcaggctaggtgtgtaccaagtcatcacctgtggtaacttctggggactggttaatttctctgtgccctaggcaggagaaaaaagtgaattggtggggagaggctcagctgtaggtgactgggagtcaggaatgcagacgttgatcattcttgcaattcgaaccagaatttggcagctctgctggactttttcagtttaagtaattacgttaggatgtacctcccagttacctggcctcttgctacctctggtgcttactctgagctgggacatggcctcttgctacctctggtgcttactctgagctgggatgtgccatttaacctttgaaacagccgggtgcggtggtgaagttacttgccttgcccgaggtcactcggtagtagtaattgacaaagccaggtctcactgcagaggccttctctgttcagagtggcctacctgactgctgctgccgactggacctactgacctttcagaagtactagtgtctgactgggtgaactcatgccctcactcatcgtaagttctgtttgtttgaaagcttgaacagcttaatcggaggcagaaggcagttttgacttttttttcctcgctccttcctgattgcttctgttttctccggaagcgagtcatccactgggagtgtggtgttgctgaagctccatgcagtggctcaggtgctgctggatgagtgtggtggtgagggaggagtgaacagagaatgtgtgagggagggaggatgggggttggtcaaggaatttattctgtatgaaaacatgagggggcggagggccgaggtagatggtagggccagcagattgttggagttgaggttctgaagggaatgaaccagacagataggatgcagtgggtagtgagtgagatgcatgagagggaggttctgaagaggtggcagttactgagacaggtctaggtgtgaccctgagaggaagcgggggggcgagggtgggaggagatcaggtggaggtcttgggacctagaggtcagaggaccatctacctggatatagaaatctccaagaatgatcataagagcagcgggagaggtggcaggcccggagctaaagttgggaaggaagaagtagttgtctgggttggcagataacgtgccaggcggggtagtgaatgatttactctaataatggaagtctcccagctggggattttggggagggtggagggagaacagtccagaagcagctcccaggagcaaggagacctccccacttggaagggccccaggaggtgtgccctcaggggagattccaattaggtaagagggtggcaacaatgttcagaggagattgaggacatggaagatttgctcaagaccagtcctgagtaccagagggcccaggagttgggggaggggagatggggacaaagcaggccccaccgtgtgagagtgagggttaactcaggggtcggggcttcttgtgagaagcatcatgtggtctatgattgatgtgttggtgacgctctgagtagtgagggcaggtgggaagggacaggtggacgggccggacaaagagtgtcctgactccaacctctgcagacagaggtggggggaaagctgagcttatgccaggtgagaaagctcccctatctagcgttagggacagttaccgtctggagtggaaagcacgcagagattataaactgtccactcccaggaagcttcacacagcctttatgtgacttgtactttttccagaattgggattttttaaacgtaaaaatgtagtttttggctttgcctgaaagacatgaagatgtaatggaaccaaaccagaacacaggcctgttttcctgcccagcagtccctggcaggagccgagtacctctttcaggcaggagatatgccattccctagcctgtagatcttactcagcttgcctcatctcagctactgcttgccctctgtctctgtaggcctttggcttgtgacccctaccttaaacatatgctccatttagtaaatggtaacacgtaacagttctttataaattgcacattacagtgtgagacagagagagagcatgcgcgcgcgcgtgtgtgtgtgtgtgtgtgtgtgttacggctggctgttggggaaatccttatatcaggtagctgcagatatgcaggatttttttcttttccttttccccacccaggtggtaaatcctggtatttggagggtcctgaaatgtgtaatgttgctcaacaccaggccagatcatatatttcctcagcagaatagaaacttgaaaggtcctttaggagtggccagttaggtgtagttcttgctgccaataactttgtgcctggccctgggcatcagaacttgtgttaatggttacttggcttaaggtcttttgtttttgtttttgtttgtttttgtttttttgggtttttttttgagacggagtctctctcatcgcccagtctggagtgcagtagcgcgatctcagctcactgcaatctccacctcccgggttcacatcattctcctgcttcagcctcctgagtagctgggactacaggcgcccgccaccacgcccggctaattttttgtatttttagtagagacagggtctcaccaccgtgttagccaggatggttcaaggtcctttgttgattcttcttgggaatttccactggaggcaagcagggcaacacttatttgagaacctctcctgcacctttttttttttttttttttttttgagacagagtcttgctgtgtcactcagactggagtgcagtggcgccatcttggctcattgcagcctctgcctcctgggttcaagtgattctcctgcctcatccgcctgagtagctggggttacaggtgtgcaccaccacacccagctaatttttgtatttttagttgagatgggatttcttttctttttttttttttttttttgagacggagtgtctcgctctgtcgcccaggccggagtgcagtggcgcgttctcggctcactgcaagctccgcctcctgggttcacaccattctcctgcctcagcctcccgagtactgggactacaggcacctgccgccacgcccggctaattttttgtatttttagtagagacggggtttcaccgtgttagccaggatggtcttgatctcctgaccttgtgatctgcccgcctcggcctcccaaagtgctgggattacaggcgtgagccaccgcgcccggcctgagatgggatttcaacatgtgggccaggctggtctcgaactcccgacctcaggtgatctgcccacctcagcctctcaaagtgctgggattacaggctcgagccacgtggcccagccctctcctgcacttccaagggattttcgaaatgcatggacctctcaggttaattatagtgtctgtagaaccttaactgctgtaagctttccagcagactccacagacgtgttattagttgccaccctttctttactttcctcctcacccccatggatagtcgtgaccctggtggtcagagataagatgacagaagagctaaagtaaagctggtgttggcgatcagctgggaattctctaaaacagcttctcacattattcttatcctccatagaaggagtgcttgtcctacttgcaggcaaggcagtttggttccagggtagttcgaaatcttattcactgatatagtcagcaaatgtttattgagcacccaccaattgccaggcactgactcactcaaattagagcactgaacaaaatagaccccctcccccatccgtggcagacgtgtcataatgagaggaagacagtacaataaatgaacagatgaatgtatgtctggtgatgagtgtcagggttggtgtgcttagcactgaaaatgggggcttctgaggttcaaatggttgcagttcctaaagaaggttgagggccttgccttcaggtcaccgcgggagactggcccctttccactggaaacattgctttgcccagtcagtatttgagagctcagcctgcaatggagaaatcacacttctcctctttcaccctgctccccaccctgtttctcattttacccatccccagccatttgcagaatgcatgcagagcttctgtttgccatgtctggaggctacaggggaggctgaataaggggtgataagcctgtggctcatgtgaggcgggagagagcccagcaggagtcacactgaaatgactccattagccccaggaggccttggcccaccggccatgactaatgtggacattagagtgtggattccgatgtcctgcaagatcctcctcacaagtgtcatttcatggtttttttctggcaacatctttttgaaaactccctgtaaagaagtgctgatgttgatgctgaggcccaggaactttggagtttatttacctttttttgttgttttattttccttggcaggtgaagtaggagctagagtttacttattttgaagtttatttgaaatatgctttttatgattagaagccattttagaaatgagggcgaggccgggcgcggtggctcatgcctgtaaccccagcactttgggaggccgaggcaggcgggtcacgagatcaggagatcgagaccatcctggctaacacggtgaaaacccgtttctactaaaaatacaaaaaaattagcctcgcgtggtggcgggcgcctatagtcccagctatctgggaggctaaggcaggagaatggcgtgaacccaggaagtggagcttgcagtgagctgagatcatgccactgcactccagcctgggcaacagagcaagactctctcaaaaaaaaaaaaaatgttatgctaagtgagaggagccacttacaagagaccaccacatgtttggccgggtacagtggctcatgcctgtaatcccagcactttgggaggccgaggtgggtggatcacgagatcaggagttcaagaccagcctggccaagatgttgaaaccccatctctactaaaaatacaaaaaaaaattagccgggtgcagtggcaggcgcctggaggctgaggcaggagaatcgcttgaactcggagggtggaggttgcagtgagccgagatcacgccactgcagtccagcctgggagacagagtgagactccatctcagaaaaaaaagagggcaagaattcacatgttgttttactcacacgtgttggagatggagctcagggtgattcctgactgggcccagggtccatggcctcagaagtcccttaatctgaagtccttcacttttatgtgatactgctgggcacaatggctcacgcttgtaatcccagcactttggggggctgaggcaggtggattgcttgactgaggagtttcaacatggtgaaacaaaaaatacaaaaaactagtcagcctgtagtcccagctatgtgggaggctgaggtgggagaattgcttgagcccaggaagtggaggttgcagtgagccgagatcgcaccattgcactccagcctgggcgacagagcgagaccccatctcaaaacaattttatatgtgatagtttgtccatgtgtatgccagggtctgtcatttagagtgtatggcatgttcttaaaggggtgggggaacaaaaagatactataatagtttgtgaccttttgaagggccgctctacatgaatagatatatagtatgtctgtggtgttaaaattttgtggggcgattaggaaaaacatttccaaaaagtcttagggggaaggtagtaatgaaaaaaggttgagaaacaccattccagagagagggtccaagagctttcctcagttctgaaaatggtccatgatttgcacaaggtaaagaatggctgaatgcgaattaacagcagacagtttcttagaagatttgaaactattgtttccttcccagctattcagatggactgctcgggttcttgttatggattgaggcgagggtagacttaatagtcttgtttcagagtggaatatggagtgatggtaggcatgagtagtgatgagttgcattgtgctgataggttatgaaatgtaaattttttattttttgatatggagtctctgtcgcccagactctggagtgcagtggtgcgatctcggctcactgcaacctccaccttctgggttcaagcgattctcctgcctcagcctcctgagtaactgggattacaagcatgcaccaccacgcccggctcatttttttgtatttttagtagagacggggtttcaccatgttggccaggctggtgttgaactcctgacctcaggtgatccacctgcctcagcctcccagagtgctggggttacaggcgtgagccaccgtgcccggcctgaaatgtaaacttttatatctaaatattttatatagaaaataccaagattttatatctgaaacaccaagattttatgagcctcataacttaagtaggatttgtaattgtaaatgttctttcctcataaatacctgaggtttttttttgaaaggttctgaattgtctcaataatgaaaacttccagacacccaagcctagaggagatgggtagttggtagctttctgtactggaaacagaaacactcaaatatatagaacctagccagctaaccaaagtaggtagatttatagatcatcttaaaataaggctgattacacagtaaatgtcacctttggaatctggcttggtagaattgaaataggcttcagtacctcctgtcattcagtacctgttttcttgaactcctgacttcaggtgatctgcctcggcctcccagagtgctgggcttacaggcatgagccactgtgcccggcctcagtacctctttttaagatgctctcattcattccctggtgaaaagatgcttgaagtgcaagtgcaagtaggtgtggaaagcatggagggtttgtgttgcttcatttgttttggtatttgttttttccaccagtccctccctctggctttctgcctcccagcccagcatatcctgatcttgtagccatgcaggactttgacccgtgtggtggtttgccattgtcttcctccaggtgaagataagacatcattggtttggcttgaggttgtacttttggccttccctgtatatcctcttcctccttatcctctccgtcagcatgcttggttggactctgtagtgaaatgtgtcattctctttattctgactgtccctatattagtcctgtcttcataaaaaatacaatcgtaaagatacaatatctactatttgttaaaagttttgtgctaggccaggtgcggtggctcacgcctgtaatcccagcacttcaggaggccgaggcgggtggatcatttgagcccaggacttcaatactagtctgggcaacatggtgaaacctcgtttctacaaaaaatgcaaaaattaaccgggtatggtggcacacgcctatagtcccagctacttggaggctgaggtgggtgggtcactgagcacaggtcaaggctactgtgagccaagattgtaccactgtactccagcctgggtgacagggcaagtccctgtctcaaaaaaaaaaagaaagctgtgtgctaaatactattttaagcaattataatggattaaaaactcctttaatcttcacaacaatgttttttctttctttttttttgagatggagttctttgaaactcttggattaaatgactcttcagagctttctttgctttttgatactaaggagtggcatgtctggggatttttatagcaaataacttctccttggctactatccttagaattccaagtgtttttaatgaaaagaggagacttgtttttagtgatgttagttgtttttaggaaaggtgttctgcagtgtttttcgctaaggtggctcacgcctgtaatcccagcactttgggaggccgaggtaggcagatcacttgaggttaggagtttgaggccagcctggccagcacagcaaaaccctatctactgaaaatacacaaagtagccaggtgtggtagtacactcctggagtcctagctactcaggaggctgaggcaggagatgacttgaacccgggaggcagaggttgcagtgagcctagatcgcactattgcattccagcctggacgacagagtgagactgtcttaaaaaaaaaaaaaaacataaaatggagaggtagaccagcttacgggaggtgttgcacttccctctgccactggagagactctggatctgcagccagggagcttgtgaaggcttcttgtccacggaaatgagggcggcagttgtgactttctggatggtggcccagaggaagcaacactggcagagcctcttctgtgaagcagctctgcgagcaattttgtgacattgaaagagcaaaggataaaacgttgaaagctgatccagatctagaaaagtgtttggcaattgctggaaaaggtgtagaaatgatgcttgctctgtatcgtaagttatatggtgagaagaccacaagcacggttcaaactccccttagaaattcttttgcacagaaattaacactttaatcctaaatgtttccaatgttttaacttacagtatgctaaataaacattctttctgtttgtttgttttgttttgttttgttactctgtgcatttatagccaatagagtttttctttccttatttttttgacacagggtcttgctctgtcgcccaggctagagtgcagtggtgcgatctcagctcactgcaacctccgcctcctgagttcaagtgattgtcccgcctcagcctcccgagtagctgggactacaggcgcgcgccactgtgccgggctaagttttatatttttagtagagatggggtttcgccatgatagccagggtggtcttgaaatcctgaccacaggtgtgagccactgtatctggccaaaaaaatttttttattttttgtagagacagggtctcactatgttgcccaggctggtcttgaactcgtgacctcaaatgatcctcctgcctcggcctcccaaagtgctgggattataggtatgagccaccatgcccagcttgacaaaaaaatttttttttttttttgagagatgaagtttcactcttgttgcccaggctggagtgcaatggatcagctcactgcaacctgtgcctcctgggttcaaacgattctcctgcctcagcctccagaatagctgggattacaggcatgcaccaccacgcccggctaattttgtatttttagtacagacggggtttctccatattggtcaggctggtctcgaactcctgacctcaagtgatccacctgcctcggcctcccaaagtgctgggattacaggtgtgagccaccacgcccagctgacaaaaatttttaaatgtcattgagcagtatcatttttcccactgattatgagattgctttgtgtgatcacacactgacgggcaggccaattgctgcttgtattcagtatttggccccttatagaaaacatttgcagacccttgttctagaaaaaacagatgggtgggaggaggaggaggagaagcatttcaggagtggctttgggctttcctgtcctgcacgtggtgaggcaagaagctcttgtgcctcagctcatagcactcatgggagtctgtcaataactagaaccctaggagttatttttgcttgttttaaaaataagcttgttttggggccaggcgtggtggctcacgcctgtaatcccagcacttcgggaggccgaggcgggtggacttacaaggtcaggagatcgaaaccactgtggctaacatggtgaaaccctgtctctactaaaaatacaaaaatcagccgcgtgtggtggcgggcgcctgtagtcccagctactcgggaggctgaggcaggggaatggcgtgaacccaggaggcggagctttcagtgagccaagatcgcaccactgcactccagcctgggcgacagagcgagactccatctcaaaaaaacaaacaaacaaagcttattttaatggatataaaaacatgaatgaaataagacaccaagttcaaggtggtagggggttaatttggaagaggcagagcaaatgtgattgaatgaggggtatgcaaagggtttctgctctatccatatgttttatttattaatttatttttggagaacaaagtctcgctttgttgcccaggctggagtgcagtggcgtgatctcggctcactgcaacctccacctcttgggttcaagcgattctcctgcctcagcctcccgaggagctgagactacaggcacgtgctaccacacccggctaatttttgtatttttcagtagagatggggtttcaccatattggccaggctggtctcgaactcctaaccccaggtgatctgcccagcaggcctactctatgttttagtccttgagaatgttagaatttgatgacactgagatgtggatataccagacatggggtattttctgtactcatcagcatatttgaaatatttcattaaagttcttactttgcaaagtagacacagctgcaattatgcatttttggaaaatgattaggtactatctcatctgttttgtttttttgtttttttgtttttgagatgaggtctctgtcacccaggcctgagtgcagtggcgcaatctcagctcactgcatcctctgcctcccggtacaggtgatcctcctaccttagcctctcaagtagctgggactgcaggtgcacaccaccacacccggctcattttttttgtatttttgagctcaagcaatttgctcgtctcagcctcccaaagtgctgggattacagatgtgagccactggcccagtactatcttgctaagcctataaaattagattagattggtagtacttgggacccctcagaattctataatgtccttcttagaaggtgacagcagatctatccagcagactgtagattgttgtcttagtcaccggctgattgtcttggttaaagctctagtgacttcagaaccagagaaacttgttttccaacacattcaaagaccagtttgctttgcaattttgcaatagctgacattcagaatgcctgcgaggattttgtaagtgaggttcatatttcggataatgtgtgacttttgccatttctgatgcttttccaaaagaaagttactcttccctaaaggcaggaattctacttttgcttagatattctgaagcttatgagttcatccaaatttggttcctttcagcattttcctgttggtccgtctccgttttgaaaacatacagaatgtacttaattttgccctaccatttgtgagcatacaaaatagcacttgagtcatatttttcatgattgcttcccaatactattctaagaccaacatagcattttgtcatttcataataatagaattcctcattaaggaataactttctaaaaatgtgtccagcccatttcccccccagccctggccgtttcctttggtatgttggtgtccgtgaccctgtcattgagtgtgactgaaaacagaggcctggcagagggcctggcctttgtgagccctcagattgtgataaagaccctgaggaatgttttggcttttaggcaacctcagttctgttttcctgctgcctgttgatgcagtggctttttcttcccatcagtctgaagggtcgtgttagtgcctgggctctcatcagaccacagggaactcatcctggcactgctggctgcctcactttaaccacctcaagtctcagcattctcgtttgtaaagcggagatattattacgtgattcacagttttattgtgaccattagaggtagggcacatgatatgccaggcatcatgcttggcgaaggcaataagtaatgcagccaggtgctgtggctcatgcctatgatcccagcactttcagaggcggaggcagcaggatcacttgagaccagcctgggcaacatggtgagaaccccatctttacaaaaaattaaagttagccaggcgtggtggtgggtgcctgtagttccagctactcaggaggctgagatggaaggattgcttgagctcaggaggtcgaggctgcagtgagctgtgatcatgccactgtactccagcctgggtgacagagtaagactgagtctcaaaataaataaatacaaggtttttgcagaacagtgaatgagaaaatgcactgttgttatttgtggtggaagtgaatactatatggcctgtgtttcctgaaggaacactgcctccattaaaacaaatgagcaaacaaaatcccttttcatgacttcagttctctcaggcctgagagtaaagtttacatcatagatgcttaaaaacaattcagttagtgaaagcatgtgacaagatgagacgatttgtcttcaacgaggagcttccttccatactcacaaaaagatgtgtgtcttaacatagtaaggacatggttaaatttagtcttatttggacctaacttcagccaattaatctgctacttagaactcttttactcaaatgaaatttgagtaaaaaaaaaaaaaattttttttttggccaggtgcggtggctcgtgcctgtaaacccagcactttgggaacccgaggcaggtggatcacctgaggtcaggagttcgagaccagcctcaccaacattgagaaaccgcgtctctcctaaaaatacgaaattagctggtgtgatggcgcagtcctataatcccagctactcaggaggctgaggcaggagaatcacttgaacctgggaggtggaggttgcagtgagccgagatcgcaccattgcattccagcctgggcaacaagagcaaaactccatcttaaaaaaaaattattataataattttcaagtatatacaaagcagtgacacattttgtaaacccccatgcaccatcacacagcttcaacaactaccaacatctgtctttcagacatgtttttagtccaagttttctcttaataaagagactttttctttttcttttttgtttgtttgagactgagcgttgctctgtcgcccaggctggagtgcgatggcaagatcttggctcactgcaacctccgccttgcgggctcaagtgattctcctgcctcagcttcctgagtagctgggactacaggtgcccaccaccatgcccagctaatttttgtatttttagtagagatggggtttcgccatgttggccaggctggtctcgaactcctgacctcaggtgatccgcccacctcaccctcccaaagtgctgggattacaggcgtgagccaccatgcctgaccataaagacatgtttctaaattctcctgggacaacagtgaagttctacctttccttcctactttaccgaaggaacctgaaaataaggctgctttctgaaacttaaactactaagtcagtgatatttagagcagatgtaagcagctgtctagacacagaatggcttcccaggctcgcaagacttgtcatgaagcccccagcacgtcaacagaaagcatccaagctagaagaggcactggctcacagcagcaccccagaaaggaagcgtctcagggacagatcgtgaccgtgctccggaagagctgtcctcagccgctactgtgagcatttggcctgcctgacagattctgttggtgagaatgttcttaggaatcatacagtaaactaactttattctgacttcaagcatcgtgttccattgatgcttgctttccaaggtgttttgctgattcacatcagcatgcaacctgcttgacagaatacagtgatgttctcactgtaaattcatcacctgctgctgtggtctcatgtatcatcccgtgcgctgttagctgaggccagtgctcctgtgtctcctcagcacgagggcactggcaagagtgcatgtctgggcctataaagatgttggccaggttctaggcagggttgaattcaccaaggtaactgccatccatccctcaataggcattttttctcctacacaccctcaggcacatgccacgtgtacctggcacccttacttacgaagttaccgaattcctgccatgatactgtgggtcaccctgcttcattctcaggtgtggtgtcgggtggttcctgcctgggcgccgggtgttgttgggccctccctcaggttattggtttttgttttgagatgtaattcacatgccatatgattcacccatttaaggtgtacaatattcccctgaagtttattgtggaaaaaggctgtgtctgacactgcttaggaagctaagacacaaagcagccagaggggctgccagggctcactgtggcagggcggcggagaggctgctggcgcctctgtagctgttgggtgctcttgccttgatgctgttttcagctttggattgtaattgggtcccacgtgggtcctcttcatctcgtcttgttggtggcagtgttgctcccagcgttggggtgggcagagtcacacaccagaggacctcctcctgctgttttctctggaccttgttgattatgtgttttgtgacctttggcatattgtacctgttccaggtgtacagccagctggttttggttgatgtgtaatggacaaaaggtgcccctatttaaaaaaaaaattttttttctgcttgtagtcccagctactcaggaggctgaggtgggaggatcacttgagcctaggaggcaaggcttcagtgagccatggtcctgccactgcactccagcttaggtgacagaggaagaccctatctcaaaaacaattatataggccgggcgcggtggctcatacctgtaatcccaacactttgggaggctgagatgggcggatcacctgaggtcagaagttcgagaccagcctggccaacatggtgacaccccatctctactaaaaatacaaaattagccaggtgtggtggtgcatgcctgtaatcccagctacttgggaggctgaggcaggagaacagcttgaacctgggaggtggaggttgcagttagcggagatcacgcctctgcactccagcctgggcaacaagagtgaaactctgtctcaaaaaaaaaaaaattatcataaaatcactcgttttaagtatatcatccaaggattttagcaccttctacagagctgtgcagctattgccacaatccaattttagaacattttcatcatcccctaaagatccttttacccatcactccccattcccacccccagtaccaagcagccactcatctacttcctgtgtctattgatttgccttttatggacatactgtacactttcattcatatgaagtgtctagataaggtaccctctaacgggtgacttttcatggttagcttttttcaaatgatagggaatttcctgcttcagaagatgctttttctgctgtgctacttacctgtgatctattgtgtgggtgggatttccttggaggcatgtatgtgtttgtttgttttgcagagtagcaaccttttttgtccgttgattagtgttctgtggaacatctggtttcatgcccatcactgtgacatatttggggagacacaacagaagatatatccctagtgggtgaaacaaacctaacaaacatgaaaacaactagcgaggagtcaatgacaacatctaagcaagcgtttggctgtgggatgcttttattggagacatgtttatcaagcatcctgtgccaggccctgtgcaggttggaatgcccttgtgctgagcaggcagaggtgggtgaaggccagggttagggaggggtgataaccgtgatacaggagcagacatggagccacacagccaggctgttttcttttcaggtcgccttcaatccttccagtggaaaggcttattttggtgcaggtgttgcttctagcaattgtttctctctccctttcaagagagcgtaccgaccttttgcaagaagtgtttctggctggaattttataacattggcttttgtttcccttttactaaagtagggccagatttgagggtgccttgaaacccaggcccatcttggtgtgcccaaataggagctgtaacaagccgtggtgcaggggtaggacctgtgttgtctttggagccatgggctgggctgcaggcactcgagttaagaagcttccttctgaggctcttccagtaatttgagtgtcctgtggcctgcctgggcagagagtggacaggaaagatcaggaaaagcacgtgtgaggactaccgagggtgctgatagcgcctctccttcccaacttcacttctctggctctgacctttcagccctaagctccccttggccctgtgggatggggcagcatccagaagggtcttggagtcaggttttgttttgtttttttttttttaagtcatgtttccattgggcgtagtggctcgtgcctgtgatcccagcactttgggaggccgaggcaggcggattgcttgatctcaggagttgaagaccctcctgggcaacatggtgaaactccatctgtactaaaagttcagaaaaaaaaagcccagcatggtggcgcacgcctgtagttccagttgcttaggagggtgaggcaaaagaatcgtttgaacctgggaggcagaggttgcagtgagctgagatcgagtcaccacactccagcctggcgatggagtgagactctctctccaaaataaataaataaagttatgtttctacactggatgtgcatgtcttcaataatggggacaggggacaaaacacacaactgaaatacagttcagtgggtgggttgctgtctttattgttgggtgatgtgtttatacaaggaaggaagcactgagtgggcctgttgacgatctgggcttgggaaacagctcacaggggaactgctggaactcaaggctctggttctcctgggggatccatgtacaggtctgtgcgtgtcctttgttgccaggattgccctgccaagctaaccgggttgtgcttcgcgtttcagacttctgcctggtgtcgaaggtggtgggcagatgccgggcctccatgcctaggtggtggtacaatgtcactgacggatcctgccagctgtttgtgtatgggggctgtgacggaaacagcaataattacctgaccaaggaggagtgcctcaagaaatgtgccactgtcacaggtgagatggcagtagttggagcttttgtttttttccttttttttttttttttttttttttttgagacggagtcttgctctgtcgcccaggctggagtgcagtggcgcgatcttggctcactgcaagctccgcctcccgggttcacgccattctcctgcttcagcctcctgagtagctgggactacgggcacccaccatcacgcccaactaattttttgtgtttttagtagagacatggtttcaccttgttagccaggatggtctcgatctcctgatcttgtgatctgcctgcctcagcctcccaaagtgctgggattacaggcatgagccactgcgcccagcccctgctttttttttagacagggtctcactgcagcctccacctcctgggctcaagcagaacctcccacctcagcctcctgagtagttgggactacaggcacatgccaccacaccttgctcattttgaaattttttatagaggcgggggtctccctatgttacccaggctggtcttggactcttggcctcaagtgatcctcccacctgggccttccaaagggctgagattacaggcgtgagccactgtgcccagccagattttgctctttagagacaatttattaactggaatgtggatactttcctctctttattagttcttgacagtggaatctgggtgacgttttaaaaagcagaagaaacaggcaccgtgtgaatgtcctggtggccgtacagtggtttcacagcagaccctcactcctcctcttcccagaaagggagcaaaacaacagggcagagctggggccagcgtgacccagcttcctttctcccactttactaagtgcaagtttcagagcagaccaaagaggaagtagccttgccttcttgagcagaggctttttgatccactccgacagggctgcccctcttgttccctgggtatttgggttattttattttattttgagacagagtcttgctctgtcgcccaagttggagtgcagtagagcaatctcggttcactgcaacctcagcctcctgagtagctgggattccaggtgtccaccactacgcctggctaatttttgtatttttagtagagatggggtttcgctatgttggccaagctggtcttgaacttctggcctcaggtgatctgcctgccttaacctcgcaaagtgctgggattacaggtgtaagccaccgcacctggccgctatttgggttatttttaattgtgggacaagtgacttgaatagctcacccagccaagttaccgatcaagttaaaacaaacatacgtcctggaatccatcctctttgcggccctcacctgcgaggagttctgtggaatcaaggtaattttgaccctgataacctcacagtttaaattaaaacctaaacctcccagcagcgtgccctggctcttagctgagtgagaaggacttcctgagagctggtggtgatgagacattggccctttggggctgctccatcccgagtgttccagagacccgagggtttggccatccaaatcctatgttaaagattttcacttttttctttttttctcgcttagtcgcctaccaggctggagtgcagtgatgtgatcttggctcactgcaacctccacctcctgggttcaagtgattctcgtgcctcagcctctcaagtagctgggactacaggcgtgcacctccacacctggctaatttttgtgtatttggtgaagatggagtttcaccatgttacccaggctggtctcaaacgcttgagctcaagcaatctgcctgcctcccaaagtgctaggattacaggcgtgagccactgtgcccagctaaacatttcactttaactgaaaaaacaaacaattacactggcctttaagtaaaaaataaataaaaatattttcagcggcactccccctaacatgtttttttgatgacttggtgttgtctctgtgagccaccgttgacccagttactgtatttctatcgtcagctgtgattcattatgaaggaggacttgggagaactatcttttgctaccttttctgagctatcccagtcaagagttgcctttagcaaatgtatctgtccatcctggctgtttgttacctcctcaggaagggagctgaagtgttgagaactcaggcagtagacagtgaacatagccaggggacatgagtggctgtgtgttcctgggagcaggcaggttagctgtctccctagagtccggccccgccttgcaggtccagaaagcacatattggcatctgactggctgcaatgtgtgtctctcgaggcgctcccatgtgagtctgtaaagagctaaacactgccagggctgctagtgcctggggtcctttgccggcatattctctcccaggcaggcaggctctgtgggaaggcaagtgagaatgagactgccagtgtattaattcatcatgagaaccaggaccgccccggggagcaggcactcgtgtccccgggcccacgcctttagtccgcataggcaagtctctagtccagttgccagaagactgcttgatgaagagagaggcagaacgcggggagctggtttgcaaggtgaccgtttaatagcatcaggctaggccaggcccgaggatgcggaggagccagggttccctccatcttggacgaggtgtgggagataagcgctgtgtaaaatgtatcatgtgggccgggtgcggcggctcacgcctgtaatccagcactttgggaggccgaggtgggcagaccaagaggtcaggagatcgagaccatcctggctaacacggtgaaactccgtctctactcaaaatacaaaaaaaaattagccgggcctggtggcgggcgcctgtggtcccagctactccagaggctgaggcaggagaatggtgtgaacccgggaggtggagcttgcagtgagctgagatcgcgccagagcactccagcctgggcgacagagcgagactccgtttcaaaacgaaaaatttgtcatgttaacctttaaaaaaagtgtcgtgttttgttttgtttttctccccccaaagagattaggtctttttatgttgcccaagctggtctcaaactcctggcctcaagtgatgccccccacccttcacccagtgtaagcactggtattacagttgaattagttagatgagttgatacagttaagcaattatttggccctggaagtcactgtgttttgattgtttgtttctttctttgagacggagtttcactcttgttgcccaggttggagtgcaatggtcaatggtgtgatctcggctcactacaacctctgcctcccaggttcaggcgattctcctgcctcagccacccgagtagctgggattacaggcatctgccatcacgcctggctaactttttgggtttttttgtttgttttttgagacggagtctcactctgttgcccaggctgagtgcagtggtgcgatttcggctcactgcaacctccgcctcccgagttcaagcaattctcctgcctcagcctccggagtagctgggactacaggcgcgtgccaccacacccggctaattttttgtatttttagtagagatgggttttcgcagtgtcggccaggatggtctcgatccctgacctcgcgatctgcccaccctggcctcccaaagtgctgggattacaggcgtaagccaccgcacccggccctaacttttgtatttttaataggttttgccatgttggccaggctggtctcaaactcctgacctcaggtgatccacctgccttggcctcccaaagtactggaattacagccatgagccaccacacccggccaagtcactgtctttttaaggtcactttgcacatctctgctctgattccctgcaagttaatcttaagtttcctcttcgggaggcaatcttggttccttatttccaagttgtggtctggcatgcacattgaaggtcccatgtaaaggagaagtggatgctgtggtgagaggcgcacagggccagctcattctttgtccctggcagtctctcgaaagctctttcactgtgctgtttctttgtccccttgcagagaatgccacgggtgacctggccaccagcaggaatgcagcggattcctctgtcccaagtggtaggttcttaaagagacccgcgatggagtgaggccaccggatgggtcattgtgaaaggacacttgtcatttgggaactgtcacaggcttccctctcatggttctgtttactcaaaattggcaaaccgggggctctgcctgggctgccggcttctggctccagcatccttatgggggagtttatactgtccagctgacacaggggccggggatcctgcagcacttcctggctggcccccatctcctcctggaggatgggatggaggtggctgctgcccatgaggctcaggcccctccttgctgtgcgggcctccagctgctctgctgaccccactccccacccaccctcctgtctgcctgttctgtctcctctgcttcctttgctccctgttgccatcgctgtcccctgccccgtgggcatcctctgtcctctgccacccccgcctccccgccactgcagcttgtgatctcaagatgtgtgttagcttgctttgtagtgctggcggctgctgccccattcctcctttatggtttaaggactctgcatcgggcgcctggggtgagtggtcccgatgcactaccaggtagcaaatgcaccctcggggcagacctcaggccatggactctgggaggctgctgtggagggggtactgcaccgcacccctgctggaggatgggactcccccggcagctgctacccaccgagtgcactgtagctcagcagctgttgggccggctggcttgcagagtgctggggcgttagggtggtcactttccagctttgctaggcctggagtcctgtgcctgtcctggctttgctctgcctggctccctgtttatcctctgctagcccccccacacaccagctctggtttccatcttgttggagaggaacatgtccccctcactgtattagaaagtgtgaacaagaccgtgttccctataatattaggagctgtggcaggcttggtttctataggaaccctgaggtggcggcagggccaccacatccagcactctcagtgtgtgcgtagagcccattagggctggggtgacgtggcagagccggccatggaaggggctacacaccccttcttaaaggcgtgtccacactcctcagtgggcccttccagacccagacccagctaggcctgtgtcctgtgtccggcccagcctccctaacacagatgtttgtgtttcagctcccagaaggcaggattctgaagaccactccagcgatatgttcaactatgaaggtaaaactccaaagaggccaggtgcggtggctcacacctgtaatcccagcgctttgggaggctgaggtgggcggatcacgaggtcaggatatcaagaccatcctaacatggtgaaaccctgtctctactaaaaatacgaaaaattagctggacgtagtggcatgcacctgtagtcccagctactcaggagactgaggcaggagaattgctcaaagcctgggaggcggagggtgcaatgagccaagattgcgccactgcactccagcctgggcaacagagtgagactctgtctcaaaaaaaaaaaaaaaaaaaaaaaaaaaaactccgaagaaacttatatatggggcaaaacatgtattcttagttgggtattgagagacacttgcggattttcactgaggaagttgtagagcagggctctcccctccccaggtggtggcagccccctgaggttggggtcaaggtgacaggccccacgtggatgccgccagcagtgggaaggaggctgcgcctgtggagatgtgcgttagaggcgtagcctggcacgtggctctgcaatttacattgtccctgaacctctcgccagcggcttggctgtgggcaagtgactgttgccccgcctcagagttcccatgtataaaatgaagggtcccagataggtctcatagagactcagccactgcatgtaaaaggcctagaacagggcttggcagagagcagccttcaaagctccgaagccgtcacctggacccaaggagcagcgcgtcagagccgctgcactggtcttgggtgtaatttacaggcttctttaccagagagatgtttctccgtctgctggagccgcaagcctcctcaggcactttctggcttgcttcccctccttgcgggccctactaatttgtattccctgggctgtcttactcctagaatactgcaccgccaacgcagtcactgggccttgccgtgcatccttcccacgctggtactttgacgtggagaggaactcctgcaataacttcatctatggaggctgccggggcaataagaacagctaccgctctgaggaggcctgcatgctccgctgcttccgtaagtctgcagcccctcagcccaggaagccctgcccttgaggaccccggtccatctccccatccctaaaatatgaaggccttggaaatgctgttcttgggcccaccagggcagcaaggcctctaagccccagaaaagctggaagaaagcccctcagaaagagctccccatggaggccctggctgaggggatcccctgcggcagctctgtggaatgggggctgtgagctgacctcaggctgtgtgttctcttccaggccagcaggagaatcctcccctgccccttggctcaaagggtaagtggccccttaccctcctcctgccatcagcctgcctcctcccttccttgactgagctcagccctgcccagctgtggtttacattatccttcactgtgaacatcatcttggcagaaagtcatgtttctgcgtgagaatggcgaggtggtggtttgtcccaccgttcagtgtacacagttggggctggagtgagtcagtcacaaggcaggccctgcccaggcggcgtgggtgactggggatgaggtcttcctgttgagcatttgaggactgctgcacacgggcctgaggctggcctgaggtgtggagggagcgctgctatgtggggcataagagttggtcacgggtgacaggacggaggaccacgggccagggtgtttcccaacacagtctggtctgagcgggaggccaggcctctggcctgtgtttctgagcttgagttgcaggtgataatgttggcacaaaagacctgccatgccagtctggcctctttctccacctgtttcccggtgaaggagccaggacctggcctgcgagtctgtcctgttctagcagtgaagcctggtttgccaggcacggggctgggaagcaagcagtctgggtctggagggtggccccaaaaaggccaactctgcagctccacagccacatgggggaggctgccacaggtcacactccttagccggatcccctcctgaagaaaagcatctgagctgaccagcgagactgcagtggggcagacactattaaatttgctggcacagctctgagtaccccctcgcttccaccctgacttcatcccgcagtagctctcagccctcccagcccctgcagggccacgtctttctctattgccggtcagcgtgtgtgtgcacaaagcccctaaggtttcatgtgtacacaccggtgctaagtgttttttacacccttgtgcatctctcggcctggggctcctgtgcaggttgccctgagagttgggtttttagttcaaaaagaaggaacacagatgactactctgctggcgacacggccactctgctggcacgcacatagcatggcgcctccttttttgggggactctccttggtggcatctctggcaggctgtgtcctctccagctgcagttctggaccctgtctgggttggggaggggcatttggtcctcaggctgagcccacctggattccccaggcccttggtgagcgccactctggctgcaactccccttgcctggcccgtcctgaggcccctctctcgtcctcagtggtggttctggcggggctgttcgtgatggtgttgatcctcttcctgggagcctccatggtctacctgatccgggtggcacggaggaaccaggagcgtgccctgcgcaccgtctggagctccggagatgacaaggagcagctggtgaagaacacatatgtcctgtgaccgccctgtcgccaagaggactggggaagggaggggagactatgtgtgagctttttttaaatagagggattgactcggatttgagtgatcattagggctgaggtctgtttctctgggaggtaggacggctgcttcctggtctggcagggatgggtttgctttggaaatcctctaggaggctcctcctcgcatggcctgcagtctggcagcagccccgagttgtttcctcgctgatcgatttctttcctccaggtagagttttctttgcttatgttgaattccattgcctcttttctcatcacagaagtgatgttggaatcgtttcttttgtttgtctgatttatggtttttttaagtataaacaaaagttttttattagcattctgaaagaaggaaagtaaaatgtacaagtttaataaaaaggggccttcccctttagaataaatttcagcatgtgctttctttatgggagtcctaatttcaaccctaccaaaatgatcacaagacactatctgaggtgtcccattctagaaatagacccctcaaaatagcgtctttcagatctttttgaatgaatccacaagatgaaataaatgtcctattactgagtgcccgtgaactttcgccaaaccacacttagcctcaccacctgtgaacactgatattttattactctatttcactttttaaaacttctggctacaaccctctgaactgatcttgatgtcccactatagactgtagcccacaccttgaagcactgccctcgagggcgcaggaggggcgcatgctgtccagggaggaccaagaccttccggggttggaggggcttaaccgagtccttgtggcgtccatgacgcttctcctctcgtggttctgtgctctctgcatcttgaaggggtggtgggagggcgctctaggtcaggccttgcaccgcctgccctgggcttttctgtcaagtctccaacacacccctgtgtgggaacggggacagagaactgcccggctgaatttggccttcaggcccaatcctgctgcctcctgtgggtgttcctttcctgacactagactctagaagcccctttcctccctcctctattccaacaaggaggtcctggggtacaggcatctgggcgccccatgaggtccggcaagcagctggactctacctgcctcagagacacaggaggagtggccaggtgcagtgccacaggccagactgctttcgactgcttggaaccaaagaacttccatgtctttcccttggcccttcctagaaatcccttagggcttaaaactctcttccagaagcaagttgggcaaatagctcatctgctcctgccccgcctccctcacagcagatgccgcaaagggatcctggtgtcctcccagctgatccccgcatgcctcagcccactctccagtggtcattgcagctggctcggggttggtgaacaagtggaatctacttaccacgtcccagacaaatcagacacacaggggtctgggcgagcctgtggtccagggaaagagggcctgggagttgggcagagcctctccacctgcagcgctctgtgtgtggcagtgggcgcggcccctaacccctgcaagcctgcagagtctgcacatgcacctctgcccagcaggagtctttctccaccaactccaatatggactgtctcctatctcagtcatgttgaaaaaaaaaaaattgtgcctttggacttttttaaaaacttgagaattggccgggcacagtggctcatgcctgtaatcccagcactttgggaggctgaggtgggcggatcacctgaggtcaggagttccagaccagcctggccaacatggtgaaaccccctctctactaaaaatacaaaaaattagccgggcgtggtggcgggtgcctgtaatcccagctactcgggaggctgaggcaggagaatcgcttgaacctgggaggcagaggttgcagtgagccgagatcacgccattgcactccagcctgggtgacagagcgagactcctttcaaaacaaaaaagcaacaaaaaaacttgagaatcacttaattctaccataataggaagttagatgaagggaattctctgaagcccagttgagcttctgtaggtttctaatacaatgagcctttatatgtttctagtgcagaagctgctgctctgtgacccacttctcctgcctaaacctgccccttctcacggcaagggaggcctcagcccctccgctcctggcagctcaactccatccgggcctctggactctttccagggcgactggtgggcctcaccacagcagacactcttcaggctgctgccgccgtggcccttgaagctcagctgtgtcatgtgttcaattcttggggcattttacggcctgacaaaggccctctttttgttggaaaggccacccaacagtgggtcagtggcctcggcattcagtggccacttcacatctctgtctccctcgggttgctggcaccattgagaggtggaatgggctttataaaaaatcaactcattgctggtccaagtgcagtagtgtaacaagtaattgatcacaaccagttacagagttctttgttccttctgctgctttccttgaccagcctgaaaaaaaatcagctcaccgaaaatcagctcagagcttctcactatctcttcccctggtccacaagcttgaggaaggcagacagtgtggctgtccctagaaagggttcccctgggccatctcctgggtaaagatcaggacaaagggctcggcggttatacagacccataaacattaggggccggtgcagtggctcatgcctctaatcccagcactttgggaggctgaggcaggtttatcacttgaatccggaagttcgaggctagcctgggcaacgtggcaaaaccccatctctacaaaaaaacaaaaattagccaggcgtggtgatgcatggctgtgctcccagctacccaggaggctgaggtgggaggatcgctagagcccaggagatcgaggctgcagtgagacacgattgcaccactgcactccagccagggcaacagagcacgaccctgtctcaaaaaaaatacaaattgggcacagtggctcacacctgtaatcccagcactttgggaggctgaggtgggccaatcacttgaggtcaggagttagagaccagctcggccaacatggttgaaaccccatctctactaaaaatacaaaaatgagccaggcgtggtggcacacgcctatagtcccagctacttgggaggctgaggtagaactgctggaacccaggaggcagaggttgcagtgggccgagatcgcgccattacactccagcctgggtgacagagcgagactctgtctcaaaaaaataaataaaaaacaggccgggcgcagtggctcgcacctgtagtcccagcactttgggaggccgaggcgggtggatcacaaggtcaggagatcgagaccatcctggctaacacggtgaaatcctgtctctactaaaaatacaaaaaattagccgggtgtggtggcgggcgcctgtggtcccagctactccggaggctgaggcaggagaatggtgtgaacccgggaggcagagcttgcagtgagccgagatcgcaccactgcattccagcctgggtgacagagcgagactccgtctcaagataaataaataacaaataaataaaaattaggaattctacccttatcattcctgggtatgtgtgcctcttttcttcccacaacatcaagcccaggcctgcctgatgggtgcagcctccagggggcaggcccaccggaacaggacctatggggcttggccttagttcaggttctgcccttgggactctcctggactcgcttgtcctaggtcccaaagacagtggccacttggtcgagtgtcctttttgccaagtctccctacttggcacatcagacaacgtgagggaaatcataagtctctaaatttgtaaaaatgcccatgttccattcacatcggactcttccaaaaacaagtctgggtgtgagtagatgttgaaagaagaagtgaagcggtacttccggggtgggatacagactgatttcatgtccttggagggagaccaacaacctggcacctgaggagggaacaccttagaccccaggaggtggggggagaggggtggggagggtgcaatcagtcctccctctggcctccagacccagcaccgctgcttggccagactgtcacctgatcctcccaagtccagcagcatctgcagctgctattctgacccactataaaaacacacctgtaagctgggcgcagtggctcatgcttgtaatcccagcattttgggaagcccagcactttgggaagccaaggcgggcagatcacttgaagtcaggagttccagaccagcctggccaacatagtgaaaccccatctctactaaaaatacaaaaattagctgggcgtggtggtgcatgcctgttgtcccagctactcgggaggtggaggcacgacaattgcttgaacctgggaggcagaggttgcagcaagcggagattgtaccactggcaccccagcctgggcgacagagtgggactctgtctcaaaaaaaaaaaaaagaaaaaccccacacttgtagacatggccagtctagagccattctgcacctgaagccatcaatggcagctcctgaatgtggggccccctcccccaacacacaagatgtttctaaacgtagggacaggcccagccttgttccagtctggctggtacaaaatcataggcttctgatgcccaaggagctctgagctctaccccacgtagtcattgagcctgcagctcagtagcactgcccatggggcttaaccaaaccaatgctgtggtgttccaagtgacgtttcccaattcctgcctgggcacagtactcacgcctgtaatcccagcactttgggaggctgagatggaaaaatcgtttgagcctgggaggtcaaggctgcagtgaaccatgctcacaatgctaccactgcactccagcctgggcaacagagcaaaacaagaccccatctctaaaaacaaaaacagaaaaattcctgagctgggcaccctggacccctcaggttgtgtgtttgcatgtgggaaggtggcccacagaatgtctctcctctggggaggaggttgttttttgggtttgtaatgacaggcaatgacaccaaagatcagatcagacttgactcccttgtgtgaatcctagtgaagtgctcccaaacctttctggcaccaaggactggttttgtggaagacagtttttccacagaccagggtggtggggggtagggggtggtttcatgatgaaacttctacctcagatcatcaggcattagattctcataaggaagctgggtgcattggctcacacctgtaatcccagcactttgggaggctgaggtgggtggatcacttgaggtcaggagttggagaccagcccggccaacatggcgaaaccctgtctctaccaaaaatacaaaaattagttgggtgtggtgatgcacacctgtaatcccagctactcgggaggctgaggcatgagaatcacttgaacccaggaggcggaggttgcagtaagcagagatcataccactgtactccagcctgggcaacagagtgagactgtgtctcaaaaaaaaaaaaagattctcataaggagcatacaacctagatccttcgcatgcacagttcactatagggtttgcactcctatgagaatctgatgctgctgctgatctgacaggaggcggagctcaggcagtgatggtcactcgcctcctgtgcatctgggttcctaacaggctggggaccggtactggtctgtggcctgggggtttggggacccctgtcctagtgaataggagactgtgtctgggatgtctgaagtaagacctggtggtcccctcgcccctggaacctggcggcatggttgaggttaatgctgcagattggagtccagttgatcatagatgcttaatgagatgctgtatgaaacaacacatttggccccagcctctgttggtcagattcatcagagtggaagcagaatgacacattcattcaatttatcagcagctaaggtggtagaggggagtctctcattcctacaggtcttgctgaatgtaccaggaatgcatgaccctgatagctctctcccttggttttattttttttttctttctttctttcgagacagagtttcactgtgtcacctaggctggactacagtggcacaatctgagctcactgcaacctctgcctcccaggttcaagtgattctcttgcctcagcctcctaagtagctgggattataagggacacaccaccaggctcggctaatttttgtatttttagtagagatggggtttcgccacgttggccaaactggtctcaaactcctgacctcaagtgattgacctgcctcggcctcccaaagtgctgggattacaggcgtgagccaccacgcctggcctcccttggtcatttcttacggttgtgtttgcagcaagcacgttgaggggtgagggcaggctgcgtatagccaggcaggtccccaagcttagcatgcctctttcgtaacaacccactccctgtgcaggtgtccatctgggtccccggctctgcctctacagcccaggggaatcccacacatggtggcgtctgtgctgcttcgtgcgagcaggaaagcctttgtctctgaccctggagtctcgagacttctcccagcatttttgaaacagtaagaggctcacatactagcctgttaagtggaatcatatcaaatcccagacccagcagtcagctgggtggaggccaagcctgggcctttccagctgggttgtcagccccttggcacttcccacggacggtccgtcgagatttcctgacgatcaggatcccagaacatcaaggaccagagcaagactgactgtggtcagaggttccagtccagagctttcgtcttctgggaaaggaaactgggtccctgcatactgtgtgcttaaggtcatctgtctcccaagatgtggttgatttcaaagaaaacattcaggaacagggattatggtgtttacagaaccaaggcactatattcctgtgagcttcaggaaagaaaccaaaccagccttgctgcagccgcttttccagtccacccatcagcccttgggcatgcaggagtgtgagacctgccgggagggctagacagtgcccttcttggtcccacaccgtcttgccttcccaacgcagttaaattgacatccagaaatcttcctaaattgcagagattaagtaaaagctttcagggttagagtgtccctcggaaggatggctgctggtgaaatgttagagaaggggtaagctgacctagcagtggatgacatcaatactgctgccagctgggagcacaggtccctttttcctacaggggagaaggcactgtttataccctcaaggcattttaggcagagatcatcagggaataaacaggaaagggcaggctgggtgcagtggctcatgcctgtaaccccagcattttgggaggccaaggaggatcagttgagcccaagaattcaagaccagcctaggcaacatagtgagaccccatctcaaaaaatatatatatattttttgagatggggtctcaccctgtcgcccagactggagtgcagtggcgcaatcttggctcactacaacctccacctcccaggctcaagcgattctcctgcctcaacctcccaagtaactggattacaggcgccaagtaactggattacaggcgcccaccactacggcctggctaatgtttgtatttttagtagagacggggtttcatcatgttggtcaggctggtctcaaactcctgacctcaggtgatccacccgcctcagcctcccaaagtgctgggattacaagtgtgagccactgcgcccagcccccaaaaaattttttgtatgagccaagcatagtggtgcatggctgtagtcccagctactcaggaggctgaggtaggaggatcccttgagcccaggaggttgaggctacagtgagctatgatcataccactgcactccagcctgggtgacagagcaagaccctgcctcaaaaaaaaaaaaaaaaaaaagttactgggtgcggtggctcatgcctgtaatcccaggactttgggaggccagggtgggcagatcacgaggtcaggacatcgagaccatcctggctaacacagtgaaaccccgtctctactaaaaatacaaaaaattagctgggtgtggtggcgtgtgcctgtaatctcagctactcgggaggctgaggcaggagaatcgcttgaaccagggagttggaggttgcattgcagtgagccgagatcaggccactgcactctagcccggtgacagagcaagactccgtctcaaaaaaaaaaaaaaaaaaaatagaagaagaaaacaaaaactaacattgattgagcatcagtttaacttgtgccaggcaggttctgtgcaaaaccatttcctagatgagataagttttcctttttacagacgaggaagcagtagtccagagtggctagctgatttgtccacaaagcagtaagcggtagagcgactgacctccaggacccaaacttgcagcccctctgtgccggtggtgactcacccttagcacagtacctggcagcaggcgatgccacctgttcactaaggcatggcgagcagcacctctgagtcacaccattctgggtggtgcacaaagcagatgagttctcaccctcatggaatgcgcactctgcctcgagagacggacactttctctcatatcctgcgtccagttgcaggcaaagccacaatcattgctcacctcccagtcacactcagggtaaagagcaaaggtctttgatttacaagtccacacccgccacccgcctctcctcccctctccctcatctgcctctctccttctgctctctctgccactctgacctcagcgcagctcctcagacacaggcacattcctgcctcaggggcctttgcatttgctcttccctcttcctctatatgcttgcatcgcttgcctgcttgtcttcaggtctttttttttttttttttttttgagtctcgccctgttgcccaggctggagtgcaatggcacaatcttggctcactgcaacctccgcctcccgggttcaaatgattgtcctgcctcagcttcccgagtagctgggattataggcacccaccaccatgcccagctaatttttgtatttttagtagagagggggtttcaccatgttggccaggctggtctcgaactcttgaccgcctgcctcggcctcccaaagtgctgagattacaggcatgagccactgcaccaggcctgtcttcaggtcttttttattttattatttatttatttatttatttatttatttatttattttgagacagagtctcgctctgtcgcccaggctggagtgccgtggtgcgatctcggctcactgcaagctccacctcccgggttcacgccattctcctgtctcagcctcccgagtagctgggattacaggcgcctgccaccatgcccagctaatttttttgtatttttagtagagatggggtttcactaagttggccaggatggtctcgatttcctgacctcgtgatctgcctgcctcggcctcccaaagtgctgggattacaggcatgagccactgcacccggcccacatactacattttctatccactcaccagttgatgaagacttaatttgtttccagttttcttttttcttttttttgagatgggatctccctgtattgcccaggttggtcttgaactcctgggctcaagtgatcctcccacctaagcctcccaaagtgctgggatttgtttccggtttttttcctactatgctatacttttgactttgtttccctgactaggatgtcaattccgtgaggctggatttttgctgatttttttttttaacctctgtacccctagctttttttttttttttttttttttttgagatggattcttgctctgtcgcccaggctggagtgcagcagtgtgatcttggctcactgcaacctccaccccccgggttcaagcaattctcctgcctcagcctcccaagtagctgggattacaggcgtacgccaccatgcctggctaatttttgtattttttttagtagagacggggtttgaccatgttggctaggctggtctcaaactcctaacctcaggtgatccgcctgcctcagcctcccaaagtgctgggaattacaggtgtgagccactgtgctcagcctgtgtgttttgagacagggtcttgcttcgtcacccaggctggagtgcagtggctcaatcacagcttactgcagcctggacttcccaggctcaagtgatcctcccgcctcagcctctcaagtagctggaactacaggcgagtgccaccatgcctggctaagttttaattttatgtagagatggtctcagtatgttgcccaggctgatttcaaactcttgggcccaagtgatcctcctgccttgcttccctcccaaagtgctaggattacaggcatgaaccacttcacctggcccatgctatatgtttgcccctcgtcttcttacctactccctcagttttctcatctgtgaagcaggggttggaacagtaggggttgaatgtttgtgtcttccccaaactcctgtgctgaagctgagtgatggtatttggaggtaggacctctgggaggtcatcaggtgatgtgggtggagcccttattaatgggatttgtgcccttatagaaagggacacaacatgagatgatcttgctctgggccatgccgggaggaagggagaaggtggctgtcaacgagccaggaagcggcactcctgacactggatctaccaacacccctatctcagacttccagcctccaggaccgtgagaactgtttcctgttgaagccaccctctctatatttgttacagcagcccacactgattaagacactttttttttttttttttttttttttttttttgagatggagcctcgctccatcacccaggctggagtgcaatggcgcaatctcggctcactgcaacctctgcctcccgggttcaagtgattatcctgggtcagcctcccaagtagctgggattgcaggcacctgccaccatggctggctaaattttgtatttttagtagagacagggtttcaccatgttggccaggctggtctccaactcctgacctcaggtgatccacctgcctcggcctcccaaagtgctgggcgtgagccaccatgcccggcctgacacttatcttttatatctatatatttttttctttgttgagacggagtctcactgtgtcgcccaggctggagtgcagtggtgtgatcttggctcaccgaaacctctgcctcccaggttcaagtgattctcgtgcctcagcctccggagcagctgggattacaggcgtgagccaccatgactggcctaaaacacctaccttttattttttaaaaaaccaacacattatcagtacttcatgccagacaccattctaggaaattaactcctctgactttcacatcaatcccatgggtagctgttatttacagatgaggaaactgaggcacagaggtaaaacaactttgctgaggtcaccttgctgctaagtgacacagctggcatctagtgcagcaggctggctccaagtctatgcccctcacccctcagacgctgctcaccaagccggaggggctgtgggagcgagttagaacacgggacgcccctggcagcagcgccctgcgtgttaaagcgccgcggaggaagctgtattgtcgcggtacgcaggaaggcaggggcagcacctccctcttcaagaacgagcatctgagcttttgggggaaacctgtagctccccgaatgccatccacagagcccccctcagtcggcctcccctgaggcaccaaggctggcggaagcagtcacctgtccatctcccccacttctcacagaggaaatcctgggtggtgccgggcaatgagtcagggctgaggaccaggacagaggttgggtggggcgtctcagcattcctccaacgggcaggtctcagcgctcctccccctgctccgctcctctgcagggcccaggcgcccttggccttaggacccaacttctcttaccgccatggagttcgacctgggagcaggtgagctcctggggagtgtggactggaggtgcagggggccggactcaagcccagaagctgcctgcaccaaccacccaacttctctccacagccctggagcccacctcccagaagcccggtgtgggggcgggccacgggggagatcccaagctcagtccccacaaagttcagggccggtcggaggcaggggcaggtccgggtccaaaggtaagtcgcctcatcaccggctgcggaggggcgggaaggctggggttgcccctgaccccagggtcctgccttaggcctccaacttcagggggctgggtaaggggcgccgcctcactgccgcacctccatccagcaaggacaccacagctcttccgactccagcagcagctccagcgattcggacacggatgtgaaggtaaggggctctcgccagcgtccccaagcacgtgccctgcaccccagagaggcgtccccgcactggggctggcggggagggtgcggggagtggtccccctgtctcgcttccagcccagaaccatctcttctctcccatccctgccctcggccccacagtcccacgctgctggctccaagcagcacgagagcatcccgggcaaggccaagaagcccaaagtgaagaagaaggagaagggcaagaaggagaagggcaagaagaaggaggctccccactgaagggccctggacagggctcattaaaccttcctctctgccttctgcgactggtcagcgtggtgcctactctggcccgtccccagctccctgccccctgcccagcgctgggcccgcccattcgtgcgcgaggccaaggagaggctgtccacgccatgcccatcagggtttattgtttctgtaacagcggccacgccctggggcggtggcctgtgcagctggagatctctcagcaccttgggttgggggcggggctgggcgggacatgggatggaggcggtgcctgtggccagacagggtggaccttggggcctgcaggcaggagatgagttcggcggccacagtggcccccagcagcagcagcagcagcgggaggttcagcgggcgcgctcaccgcaccaggtggaaggtgagccagtacatgagcataggctgcgccgccgccaccgccatggtcaggtacatgcgcagctggttccgggccccacgcaccgggaccccctcagctgctgcgtctgccaagatcttcagccgcagcgtccggatctgggtgggaaagagagagaggaaccaagggatttacccttgagccctctgggccagagtgagagcccggacatacttccagcctctgcctagaagccccaggcagctggggacaagtccctggccctctgcagcctcaggtttctgctcccggggcctcagtttccccaaacctcctaacatggtgaggatttgcttctccccgggccctgtgggcaaaatctgagaaggttccatactcaaatgccaggcaaggtcttggagcgggtgaagggggacttcccggtggacacccggcctgagggggtgggagacgtggcccaggatgctgcccccccttatgctggccacacggcaatttctgaagacacgccagaaatgctatctttatttttattaaaggacagggtctctggcctggtgcgttggctcacgcctgtaatcccagcactttgggaagccaaggcgggcggatcacgaggtcaggagattgagaccatcctggccaacacgatgaaaccccgtctctactaaaaatacaaaaattagctgggcgtggtggtgagtgcctgtagtccctgctactcaggaggctgaggcaggagacttgctcctgaacccaagaggcggaggttgcagtgagccaagatcccgccactgcactccagcttcccgacagagcgagactctgtctcacaaaaaaaaaaaaaaaaaaaaaaaaaaagtcagggtctcaccctgtccgccaggcttgactgcagtggcgtgacctcagcttactgcagcctcaacctcccagactcaagtgatcctcccacctcagcctcctgagtagctgggactacaggtgcacactgctatgcctggctaatttttatatttttttagagatggggtcttgctatgttgtccaggctggtatcaagctcctggcctccagtgatcctcctgcctcagcctgccaaagtgctgggatcacagatgtgagtcacgtgcttggcctaaacttttaaatgatgagacttaagtcaaagtttatccaaggctctgccctggcccaccagccaccacagtctgccctctgcttctcacatgctcacagtgaatcctcccagcaccttgaggtgcaagtatcatcatcctattttacaaaaggggaaactgagtttattttttatttttatttttttttgagacggagtctcgctctgtcacccaggctggagcgcaggtgtgcgatctcggctcactgcaacctccacctcctgggttcaagcgattctcctgcctcagcctcctgagtagctgggactacaggcacacaccaccacacccagctaattttttgtatttttagtagagatggggtttcaccgtgttagccaggatggtcttgatctcctgacctcgtgatccgaccgcctcggcctcccaaagtgctgggattacaagcatgagccaccgcgcccggcaaaaggggaaactgaatttaaagaaaggaagtgatttgcccaggatccaactaagcttggggtccacccagcctgcagaccccagtgctcttcaccagcacccctgactccagtgggaagggctctagagaatctccttccagggaaattctggcaggaaggctcccatgtaaggagagtggaatgagagtgagagcccagcctggagcctgtgtgctggggatccccagcctctagcagcctggctggtgtctcctcttccagggctcaggataccccctcttccaggaagccctcctgaccccccaggccgggcagccactccagggctcctcagttcagcaatgtgtctctggtctgaaccccacacctgacatcctctgcttggatgcctggatgcctccggggcacctgtgcctcagcctcaccagccccgagcccagctcaccatgaacacaaagatggctacgcagcaccagcccagcaccaggtagtagccaatcttcccgaagagcaggcccatgaggaccccgccaatcatcctgggggagggagaggaggctgtgtgaggacaaggcccaagggctggggctggcgtgaagggcgggggtactcacccgacatatttgtagcccaagaaggccaccaggtcgatggtggtgaggtcggtgttgacagtgaccagatagaggctgagcaggatggccagcacctccagggtcagccaggccagggctgagctcgcttgcagccccaggaggtctggggagaacctgcaggcacaaagccccgccacttggttggctggttcagaccccccacccccagcacccatctggggacagctctgtgttgggtagggctggacacctggcagtgaccaagatggatgtgcgcgctatcctattcccacggaaatcccatccagagaggatggcagacccatccctagacagtgacacccagagcaggcagggctggagtcacagggggctgtgctgacagtcaggagacaggtgtcagagagggcttcccaggagaggggacaccgagctgaagcctgcaggaaggagctggtcagggacaaagcccttggcctctgccacatccccagggcctcaccagttagttaatgacagatgtgttcagtgccataaaggaaaagaacagggcgatgtgagcaagaggaggggcctgatctagcctggggggcaggaaggcttcccggaggaggtgatactggaatggagccagcagggatgtgcaggtactcggcagtagtggaggggaacacgctcctgggcagaggggagttgatgtgacaaggccccaggagacagtgccagccctcccaaggaaaggaatagaccggagcgtgcagcgggaggggcagtgccaggctgaggagctggggcttgattgggagccatggatagcagggcggggcagggtgggccaggcccgcacctcagacaggaccatcctggctgctgctggagtaggggtgcagtggggagctggtgatgacagagggaggatgaggatgggtctggtagtagaggccaagaggaagggtggatggagaagggtcacccagcacaggggatggtgacgcaatgcatgtgggtaggaaggacagggaagaggcgagggtgatgctgacagtgaccctgagggctgtatcttgggccaactgggagcaaagtggggctgtcctgaaaggggaactgagaccttggaactgagaccttcctgaccaaccatgggcctcccaaaccccaccttattcggcctgccccaggcctcccttacctatcctgggtccccagcgcaagaccagccaccaaaacgtaggtgatgaaagccattgctgtgggagacagacacacagacactggtcaccagaggaagaactgccctgggcctccaggcacccacacacccgctccatataggcccggaagagagaggagggtgcagggtagggggagggtgaaacctggaatgtagaggtccggggcattgacgtcaaagcggggggccaccggggtgtcctgttggtactgcacttcccagtcctgcggggatggggagacgggcaggaccctcagagccaggcccctcccaccctgctacaggccctcctccctcgaggcgaatctcccggctccaccatgcacctgcccccacccctgagccccccacaggcccactgcagacccacattcccctgggggtgctgacctggtgtaggtaggggaagaacagcaggcccagctttctgcccacatacatggtgtccacagcaaagtaatacttgagcttggtgatggggatgaagcggtcgatctggggaggcagagctcaagtctgaagccctgtggccccgtgcatccccccactcccaccagccccgcccactcacgttcttatccaccagctccttgccctgcgcggccaggctgctcccataggccatggccatgttggacaccgggtcagccaggaaggctgcatggggcgtgggagaggctgcaggataactcaggccaccaggtgcccgctgggccccatagccccggctctgggctgaacttgtgtcatcgaaaagctggtgggggtcggccatgcccggctgggacacagggatcctccgcttcgaggctgcaagggaagagagtgagaaggagctggggacccaggataggtaagggagacctggcgaacctcattcatcccacagctctgcctcctgctgcagaggagggtggtgtcaccattagagacactggctttgatgtcagatggactggcaggtgcaagctctgccattcatccaccaacccacccatctagccaactatccatccactgatacattcatctatgcatccattcatctacccacccatccatccacctatccatctacccaccctcccactcacccacccatccatccatctatccatctaaccatccatccatccatccattcatccatccatccatccagccatccatccacccacccatctagccaactatccatccactgatgcattcatctgtccatccattcatccatccacccatccatccatccaccctcccacccatcaatccatccattcatccatccacccacccatctatccatctatccatctacccacccacccatcaatccatccattcatccatccacccatccatccatccatccatccacctatccaaccatccatccatccaccacccatctagccaactatccatctaatgatgcatccacccacccacccacccatccatccatccacctacccattcatccatccacccacccacccatccatccacccatccacccacctatctagccaactatccatccactgatgcatttatctttccatctatccatccatccatccactcaccaagctatctatccatccaccaactcattcatctatccacccatctatcatccatccatccatcatcatccatccatctaaccatccattcacccacccacccatccacttatcatccatccatccagatatcaatgatgatgattatctcaaaagctactatgtgcgagaggaagggggggctattgggcacaaaatcctgtaccaagccttttacacaaggccgctgtccatatctcctatgctccccctcaatgacttggctccagccacctgcgcctcccaatgctcactgaatgcaccaggaaggtgcctgcctcaaggccgctgcaccagctgtgcctctgcttggaacgctcttcccccaacatcctcagagctccctcctctcctcctcaagggctttgttcagtgaggccttccccagccatcctgtctacaaccgtacctcccttggtggcactccccaccccctgccctgcttcactgatatccatagaactcggcactagctgacatgctggctgtcttattttgttcactgtctcccccactcaactgtgagtcccccaaggtggggatcttgatctcgttcacagctgagtccccagccccttgcacagggttagagtaggcacttgataaaaacctgatcaatgaataaaggcagcctgggcaacatggcgagaccccatctctacaaaatatagaaagattagctaggtgtggtggttcacgcctatggtcccagctactcgggaggccaaggtgggaggatcgcttcagcctgggagacaaaggttgcagtgagccgagactgcaccactgcactccagcctgggcaacacagtgagaccctgtctcaaaaaaaaaaaacaaaaaacaaaaaacagaataaatgaccactcccaatttacaggtgtggaaaccaaggcccagacagctaaaatgacttgtgcaaagggccaaactgagtgagtggcagagcaggagtccagccctgctgtgcctgataaatattacaataatcctgtggatgaactcatctcatcttcacaaccaccctgtttctgccagctgccaatgctatcatcatccccattttacatatgagaaaagcaagccctaaagaggctcaggcctttgcccaaagtcatagtatgagagccaggtttcaaaagtttttaaaaggtccctgtggcctcacgtggggaacagatgaggggtgggcagggaagggagagaggctgctggggtgatccaggtgggagaccatggcagacaggactgggggtgtaaaagaggaatgggttatttctggatcagtttcagagctaggagggacaggacttgctgaggggtgctcagaggaggtgtgttaagaagtgggaagaggccaggcgcagtggcttacgcctgtaatcccagcattttgggaggccaaggcaggtggatcaccaggtcagaaattcaagaccagcctggccaacatggtgaaaccccatctctactaaaaatacaaaaatgagctgggcatggtggtgcgtgcctgtaatcccagctactccggaggctgaggcaggagaattgcttgaaccgggaccggggaggtggaggttgcagtgagccaagatcgcgccactgcactccagcctgggctacagagcgagactccatctcaaaaaaacaaaacaaaacaaaacaaaaaacgtggtaagaggctgggcatggtgtctcacgtctataatcccagcactttgcgaggctgagacaggcagatcacctgaactcagttcaagaccagcctggccaacatagtgaaaccccatctctacaaaatataaaatagcagggcatggtggcgtgcacctgtagtcccagctattcaagaggctgaggtgagaggactgcttgaacctgggatgtcaaggctgcagtgccaagatcatgccactgcactccagcctgggcgacacagcaaggccctctttaaaaaaaaaagaagtgggaagagccaatactgtctctatagatcctggtttgagtaatgaggcaaatgggagtgctctctactgagatggagaaaatagggagggcgggatttgaacccagcactctgcctccagggcctctgttcctaatcaataaccaatgctaccctgcaaatatctgctgagatcctactatgtgccacccactattgcaggcacagggaatgagtgatcagatgacagtgggaatggggagaggaatcgaattatccacgtcatgactttctctgcacctggatgttctcatctacacaacggagttaactgtcccaccttgcagagctgttgtgacactcataaactccttggccccacagaaagcagtccatccatgtcactcctgatcagctactagcctcgaacccttcctctcaattattcgaagcctgaagacggacccaggtctcctcaattccaaggcaagcagcactggccccagcctctctgcaagccccacttcccttttctttcccctacttcttcttcttttttttttagacagattctcgctcttgtcacccaggctggagtgcaatggtgcgatctcggctcaccacaacctccacctcccgggttcaagcagttctcctgcctcagcctcctgtgtagctaggattataggcgcacgccaccaagcccaggtaatttttgtatttttagtagagatggggtttcaccattttgggcaggctggtctcgaactcctgagctcaagtgatctgcctgccttggcctcccaaagtgctgggattacaggcgtgagccaccagtgcctgacccagagtgatcttttttttttttttttgagacggagtctcactgtcacccaggctggagtgcagtggcgtgatctcagctcactgcaagctccgcctcccgggttcacgccattctcttgcttcagcctcccaagtagctgggactacagacgcccaccaccacgcccggctaatttttttgtatttttagtagagacggggtttcaccgtgttagccaggatgggcttgatctcctgacctcatgatccgcccgcctcggcctcccaaagtgctgggattacaggcgtgagccacctaacccggcccagagtgatctttttaaatacaaataagaccacgtcatcctctgcctaagatcactattcactgtgctctgaaaaaaatccaaaggcctgctaggccctgcatgacccactcctgccaaccaccatggtttgcaacctctcctggggatcccatgcaccagccagccacatggcctttcaggccccgactctgccaagctccttgcccccactggcttttgaatatgcagagctttcatcctggaacaacctccctccatcagcacctcccaatatcacacagaggcccctgcctttgcagagaccttcctcactcctccctgtaatgcactaacctcgtctggttccttctcataacatgtggtgctttctttttctcttctgagcactcacaataatttctgaatatatattcatatgtctacttgtttacttggcacaggcctccaatgcctttccttctctctctcttttttttcttttcttgaggcgttgtttcgctcgttgcctaggctggagtgcaatggcgcaatcttggctcactgcaacctccgcatcctgggttcaagcgattctcctgcctcagccgcccgagtagctggaattacaggtgcgcgccaccacgcccggctaattttttttttttttttttttgagatggagtctcactctgtcacccaggctggagtgcagtggtgaaatctcggcccactgcaccctccacctcccaggttcaagcaattcttctgcttcagcctcctgagtagctgggactacaggcgcacaccaccacgcccagctaaattttctatttttagtagagatggggtctcaccatgttggccaggctggtctcgaactcctgacctcgtgatcctcccacctcggcctcccaaaatcctgggattataggtgtgaaccactgcgcccaacctaatttttttgcatttttagtagagatggggtttcatcatgttggccaggctggttggctgggcaccgtgactcatgcctgtgatcccagcactttgggaggccaaggcaggtggatcaccctctttttttttttttttttttttttttgaggcgaagtcttgctctgtcgcccaggctggtgcaatctcgcctcagtgcaacctctgcctcctgggttcaagtgattctcaagcctcagactcccaagtagccgggattacaggtgctcgccaccacacccggctaattttgtgtacttttattagagataggattttgctgttacccaagctggtctccaactcctggccccaagtgattcgcccacctcgacctcccaaagtgctgagattataggtgtaggccagcacgcccagcctgccctctcactacaaatctccttctcctgggtaacttttcatgatcagaattatcctcttccatgccgggtgcggtggctcacgcctgtaatcccagcactttgggaggcctaggcgggcggatcacctgaggtcgggagtttgagaccagcttgaccaacatggagaaaccccgtctataccaccccgggcgtggtggcctgcgcctgtaatcccagctacttgggaggctgaggcaggagaatcgcttgaacccgggaggcggaggttgcggtgacctgagatcgcgccattgcactccagccttggcaacaagaacaaaactaggtctcaaaaaaaaaaaaaaaagaaaaagaagtatcctcttccaggaagcttcactgacacccctaggctgggtcatgtgcctcctcagggctcccacaacatctccatcccaacacagggcctgacacatgggagttgagacaagttaggttgaatgaataaatgaaacacacagcacactcacggagatgaagagacaggaaaagggggccaacagcacaatacaggttcgcttcttaaatgagcggtaggcatggccctctgcgctcccggggggccacgaagctgtcctaagggtgtgggcgacagcaggcgggtactggggagccacggaagggtggggagcagggaagggcggatcgctaactgcaaatgaatgaaagttgcatttctctgcatatcgcacgctatccagtcccaagttgttttcttctaaaggaatttcctaaagaatcgccccccaaggggcctcctacccgaacctggcatcccagcgctgtgcacacctcagggttccagatccttgatctcgtgacctctgacctgcagtgacctcgccaaccgacgcggccgccccgccacgcccccgcccgcccgatctcctccgccggccacgtacgccacttacgcagccggggcgtccccgcagccgccgccgccaagcctgccgggtgcatccttcgccgccgccacctaagccgcggttcggagcgtgcccgcccggctcccgtacccacgccccgccggcgaagagacagccaatggacgtcaggattgagggaaggcctcgcccccacccccccgacccctccagccccccccttcacggaggcctggacgactgggcggtgccttacgtaagaggcggagactgggctactgggctcatgcagtaaagcgagtcaaggcctgagtggcaggagggcgaggccgggaccaatcccaggaggaggcggtgtctgccacgacagaaaatgagtgtctgccccttgccggggctcacgcccctaactccagcactttgggaggccgaggcgggaggattgcttcagcccagggattcgagactagcctgagcaacatagtgaccctcgccccgccccatccctacaattttttttttttttaatttagccaggctcagtggcttaacgcctgtaatctcagcactttggaaggctgaggatcgcttgagcccaggagttcgagaccagcctgggcaacagcgagatctccatcgctacaaaacattttttaaaatgtaaatatcgagcgaaaaggtcgatgggaaatgcagttctctgcagacagccgttcagtttgggtcattgagagcactggagagccagaaaaggctgtggagcaaggaaaagagaaacatttgtgttcctgaggggctaattggagttgtaggggcttatacaatttttgacatcccttaggtattaaagtaaatatttatttattttgagacagggtcttcctctgttttccaggctgcctcggaccccctgagctcaagtgatcctcctgcctcagcctccccagtaactggcaccacaggcatgcaccaccatgcccagctaatttttaaattttttgtcaaaacaggatcttgctatgttgcccaggctggtctcgaattcctgggctcaagccatcctcctgcttcagcctcctaaagcattaggattacagacatgagccacagtgcccggccttaaagtgaatatttagagtgagaaaaggaaacccaacaagttaggtgagaagaaccaggtgtctctcttggaatagatcttaaggcagtttcccagaaattcataaaaatgttctcacattgcaacctggttccctctgtccaccaaaagcattctacaacccccagcaactcacagcacacaggcgcacctgcaagtgaagagccctgcccacctagcgtccttagtctctcctctctctgactctcagtctccccccttctctccctctcagactccccgacttatctcaggaaaacatagtggtggaagttacttctgcgcagcgatagcgcatccggaaggatgtcagcaagtgaccctatcgctgtggcttcctcttcctcctctgagacgttgtctttttggagaccttaagggctgctcctggtttctcagtgatgagtgctggctccactgtggttcctttttgtgagcgaaatgcccgcattcttcttcacctctgatttagcctctgtcccctgggctccaacaccattttctcctcatcctcagccctctcttgctctggttgctccagatacatctcttccataaatgtttttttttttcttattgcttttttgtttgttttttgagatggagtcttgctctgtcgcccaggctggagtgcagtgatgcgatctcggctcactgcaacctttgcctcctgggttcaagtgattctcctgcttcagcctcccgatagctgagattacaggcgtgtgccatcgcacctggctaattttttgtatttttagtagagacagggtttcgccatgttggccaggctggtctcgaactcctgacctcaggtgatccacctgccttggcctcccaaagcactgagattacaggcatgaaacaccgcacccagccttatgtatatatatttaattaataaagcaagtactgccaagtgcagcggatcacgcctgtaatcccagcactttgggaggccaaggcgggcagatcacctgaggtcagtttgagaccatccttgccaacatggcgaaaccctgtctctacttaaaatacaaaaattagctgggtgttgtggcgggcatctataattccagctacttaggaggctgaggcaggagaattgcttgaacccaggaggcagaggttgcagcgagccgagattgtgccattgcactccagcctgggagacagagcgagactcttgtctcaaaaaaaaaaaaaaaaaaaaaaaaaaagcaagttcattagttcattggcttcctgctggcctcatgttcaccccttaccagttgtgtgactactactttttatttttttgaggcagggtctactctatcacccatactggagtgcagtggtgcgaccataactcattgcagtctctaattcctgagctcaaacgatcctcctgcctcagcctcccgagtagctgggactacagacgcatgccaccacacttggctaatttttgtattttttgtcgagatggggttttgccatgttgcccgagctggtctcaaatgactacttcatttttaagcctaaattttctcatctgtttagtgggaattatattgggacggggttgagaattcagtgcaagttcaggtgtccacagggcctggcagaatgtaagccttcgatcactggcacctattgtgttactgattctattatcaggtgcctctgcttctggattgtcaaccccaagttgggctctgcccggtgatctgccagctctttaatagaaccagctgggacatgtctgagctgagccccaagccccactcctctgccagtcggatggggttaggactctgggctgccctccaaaaggctgtcaggaaggcgctgagttctggctggaggcagaagtggagagacttacgggggggcgcagaaagaaaaatttcctcttaaatagaggcgtgtatttgtgattctgcctggcttgtttccattcatccttcatgcttcagctcagctagccccttcctcaggaagctctcttgacctccctaggcaggggtggttgcttcctctggactcccagggccctctagggctccctgattccaggcttgatcattgtacccttgcttccctcatcacagccctgaccactctgggctgtcttttttcttttttttagagatagggtctcactctctcccaggcatagctcactgcagcctcgaactcctgggctcaagcaatcctccgacctcagcctcccgagtagctgggacaacaggcgtgggtcactcttgtgtcagtctcccagttagactgggagccccatgaatgcatggcgcaggatggtctcatcattactgagtctccaggatcatccagcgaggggtcagcagaaagtgggcattgaacaaagctttggtgagtagctgaggatccccactctgtccacacgggcacaggggacacctgactctgtggtgtccgctgttcccactccgaggctcacaacttggcgaatggagcgagaattggatttcagtttgccccttgctccgtcagccgcgcgccctgatgcagtgcacaaccttagctgctgtgcgcgatggggggcgactcctcggcctgcgagcagagaggaaagttcagattcttctaacatagagaaccagccttccaggaggacgagaaggaaggaatgaggggaagagaggactacctccaccctttccatcccgttggtctgctgggtctgggagcactgggctccaccctctccgaacgaacacctggcggttgggcgtgcctcagtttcccggaggcggggcattcctccgtcgccgccccccacctcccctttttcctcttcctcttggggcatctgctgccgcgcctgtagcactcccggaactggaactaggtgccagacggtccggaggcgggggccacgtcagcggggccacccagggctcgcggggtcccggtgggtgccatgcggaggggcgcgcttctggcgggcgccttggccgcgtacgccgcgtacctggtgctgggcgcgctgttggtggcgcggctggaggggccgcacgaagccaggctccgagccgagctggagacgctgcgggcgcagctgcttcagcgcagcccgtgtgtggctgcccccgccctggacgccttcgtggagcgagtgctggcggccggacggctggggcgggtcgtgcttgctaacgcttcggggtccgccaacgcctcggaccccgcctgggacttcgcctctgctctcttcttcgccagcacgctgatcaccaccgtgggtacgtaagcgcctcaccgcaaggcggcgaggacccgggatccccacttcatccttaacccctggggaccccggggccctcacgaatacccttatcccaatcccctctgggcttcggatcccccgaaaagaccccagtgaggacccgggacccaggctcatgatatctgctctgctcggggagcccaagtccgagcccttcctcctaagtaggaaacacccagctcccctcagagtacctttgcagagaccagctgggaccccgttcctcggtcttttttttttttcttttctttttctttttttgagacagggcttactctgtcgcccaggctggagtgcagtggcacgatctcggatcacggcagcctccgcctcccggtttcaagctattctcctgcttcagcctgccgagtagctgggattacaggcacataccaccatgcctggctaatttttgtattttcagtggagacggagtttcaccatgttggccaggctggtcccaaactcctgacttcaggtgatcagcccgcctcgccctcccaaattgctggcattacaggcttgagccactgcactgggactgcattccccggtcttaatcctcttggtgacccgggtctgtccagccccctctaagcctaggactgtcctcagagacctccagcaaggacccaggacacgccaccctccaagggagatccttgccccctctggacccagaactcaaccatgccaggacccctgactttatctctagtctgggcctgccacccttgccatgtctcctgaccctccagatatgtccttctgggaaacccccctggagaaaccccatctcaacctcctcctgaccctggcgccttagcgaggaccctaaatctccagacctctcagggtgtcctcactaaagacctccctcccaacagagattcctcagcaaggacctggcaccgccatctgggactcctggccctctggacctgggcctctgctccagactgtcatctgtctcctggccccatactccccagcaggcaactctgaccccagacacaaaacccttccctaggtaccccaccccatcttgacatctcccctatatggggtcactctcaatgcaggattttcctcccaatagggacaccacctgttccctctggacctgggactcccaattcagcagccccagctagggatgtgtcaaaaggacccaccgtggagggaccccgagttttgggaaaccctgagaagccagacttgggaaatctctttgttgccaggctctgctgctcccccagccccttctcagctcccagacttcctctttgtttctttgttggggatttgttgaggagaggaggctggtgcagggttagcccagactcctaactcgccctcccggccaacaatagggggcagcttttgcttttggtcccctggcagcagagctgggtgacttctcgttagctgacctcccctgggtctgcccatgctgccagggcggcctgacctgcttctgagcttccctgggtcatgtgcacgcctcctacctcttcccagatcctggcttctaagaagtcatccctggcagggcagatgagggaagccagacacacgtcaggcacagcctggctacatccctgctcagccgcggctcattgccaggcctcagtgtcctcccccattgctaaaatggagataataacactccccatttccctgtaatagcagtagcctgacagaggacttgccaatgcatgctttaactcacttaatcatcacaacagccttgtgaggcaggcgcctttataggctgtatatttttagccatggaaaccgaagcctagagaagttgggtaactttcctaaggtcacacagcaaagacggcatagagtagagatttagtcaaggccatcaggctctagagtcccatgctgctagccaacacaccacactacttagaagaagggtgctgtgtgtgttgtaaaagaaaaaaatatgctaacacttgttaaaaatggaaagttattgtggtagaggagagaccattgcaaaggccagagagactgaactcaactgtgaatatagcaaacacagctggagttttatggctaacaagtagaataagggagtcagtggatggaagaatactaagaggagagacattcgggtagggggattcttgctaaactcagcttaacaagattcttgctaaagacaggccaaggacttagatattgagagggggtggatgagggccaggcgcagtggcttacgcctataatcccagcactttggagggccgaggtgggcagatcacctgaggttaggagttcgagaccagcctgaccaacatggtgaaaccccgtctactaaaaatacaaaaatcaaccgagcattgtggcaggcacctgtaattccagctactcgggaggctgaggcaggagaatcacttgaacctgggaggcagaggttgcaataagctgagattgtgccactgcactccagccagggcaacagagtgagactccatctcaaaaaaacaaaaaacaggccgggcaagttggctcacgcctggaatcccagcactttgggaggctgaggcgggcggatcacctgaggttaggagttcgagaccagcctggccaacatgacgaaaccccatctctactaaaaatacaaaaattagccaggcatgatagtgcgtggctgtaatcccagctacttgggaggctgaggcaggaggatcacttgaacctgggaggcggaggttgcagtgagccgagatctcgcccctgcactccaggctgggcgttagagcaagactctgtctcaaaacaaacaaacaaaaaagagtggtggatgaggaatttgatcagatatcggggtgggtggcttgtaggattcttgctaaaactgggcctacttaaggactcaggagtcagactgaagtgcggtcaaggagggagtctttgtccgtgcgaagcgctggtaataactgatgtttattgagttaatgttgactgttttcatagtgggtgaagccttgaatgcatctggagaagtggaaaaccaattaaacgtgattcagagagacctcttcccacaatgcccctcgtttggtcataggcccaaatcttggccctggaattgatctgggcagccttgctgcacttgaggcaggaggaagcgggtagtcctacccggaactgggaatcggagagaggaagtgagcattacaatccttgtaactctttccacgctcttgctaggcactatgccctatcccagcctagtaggattactaccacatttgaggaagggattgttttttgtttttcagacagggtcttgctctgtcacccaggctagagtgcagtggcgcagccttgacctcctgggcttaagtgatcctcccacctcagcctcctgagtagttggaaccacacgtgcacgccactgcacccagctaatttttttattttttattttttgtagaaggtggtctccctatgttgctcaggctggtctcaaactactcctaggctcaagcggttctcctgccttggcctcccaaagtgctggaattacaggtgtgagccaccttgcctggccaggaagggattgcttacgagcccatttttgcagagagggaactgagcctcagaggggagaagtcatctggccaaagtcatgcagggagtaaatggcaaaacactgttttggactcttctctttgaaatagtaacttgaggctcacaggccccatgcttttcaaactctatgatttgtctatttataaagatctcttttattattattatttttttttacagagatagggtcttgctatgttacccaggctggtgtcaaactcctgggctcaagtaatcctcccactttggcctcccaaagtgctgggattataggaatgagccacctcacccagcctgtttataaggatttcatgtcatttgcaaacctgccaggctgctggagtttccccatcaaaaacccttgtattaatgagggttgggggtcataagtgatacacctcaaattacagttgcttaaataagaagtgtatttcttgttcacattccaggtagtcagtccaagtcgtactgcatggtcagagacctaggctccttctcagcaaaaccctggtgttcctgcctaactcctctgcgcaacttccattcccaaggtcgcctaatggtccaagatggctgtgtagctccagcctccatgtctgtgctccagccagcaagaggagggaggaaagaagggagactggcatccctcgctccttaaggacccttcctggaagttgcctgactctttcatgaatacctcattggccagagattagtcacagaaccacacctggctctgcaagggaggagggaacgtcctgattccaaaaggccatgtatccagctaaaacccagggggagccttttaaaattattattattgttattattttttaaagtagagatagggtcttcctatgttacccaggctggtctcaaattcctgggctcaagtgatcctcccaccttagcctcctagagggctggggttacaggtgtgaaccaccatgcctggctgggatcatttcttttcccaagttttttattatagtaaaatacacataacataaaatgtaccatcttagtcatttttaagggtacagttctgtgacattaaatacattcatattgttaccatcatcaccttcatcttttttttttttaatagatacgaggctggccatgccatgtgggagatggagttattgctcaactcaaatcactctccaccatccatctctaaaacttttttttttttttgagacggattcttgctctgtcacccaggctggaatgcagtagcacaatcttggctcactgcaacctccacctcccaggttcaagtgattcttctgcctcagcctgctgagtagctgggactataggcgtgagccaccatgcccggctaatttttgcatttttagtagagacggggtttcaccatattggtcaggctagtcttgaactcctgacctcataatctgcccgcctaggcctcccaaagtgctgggattacagacctgagccaccacgcctggcccattgtctcgcccattttagaatagggcaagctgaggctcagagccaggcaagagcctgcacccttcattctttgttttgagaagtactgatcgagcgcccacagcagtgatgaaacacgcagaacctcctgctttgctgaactggcagcctatgagaagacggtaaaccatagagcatgctagaaggtgttaagtgctatgggaaaaaaaagtgttgggtaagaggatgttaccatttagggtgctcaagggaaagcctcactgagaaggtgacatttggatgaagaagacctggagaggagagaggggagcattctttggggaaggaacaaccagtgcaatggccctggggtgggagcgtgctgccctggtggaccctgtggggcttcatgggtcatgatgaggactctttccttttacctgagtgaggtggggccacagaggggctctgtgcagggaaggggcatgactgaactcaggtgttggcaggctctgctggctgaacagattgtaggggctggggatggggaagggagacccaggaggaggctgctgtggtggacaggaccagggtgggggccatgggactgggtgggggagaagtaagtgggttttgggcctatttgaaagttgagataataggcttcactgacagatggagtgcggcatgagtgacgagggcgtcagggatgaaggcaaggctcttggcctgagcgtcgaaggacagaggtgccatcacctgggacaggaggggatgtggggagaggcaggtttgggatgaagccatgtgtaggtgtgggtgtccgcagacctctcgctgcaggtgttgagtgggcaggagggttttccctggctgggtcctggggatcagatctgtaactccaacaccttggaaggcaaaggtgggaggatcactagagtccaggagctcgagactagcctgggcaacatagtaggaccccatctctacaaaaaaatttaaaatcaacggggcgtgctggacatgcctgtagtcccagctacttaggaggaggctgaggtggtaggatcacttaggtccaggagttcaagactgcagtaagctatgatggcaccgctgcactccagcccgggtgacagagtgacccccatctctaaaaagaaaaagatttaccctttactctctttactcccctaggctatgggtacacaacgccactgactgatgcgggcaaggccttctccatcgcctttgcgctcctgggcgtgccgaccaccatgctgctgctgaccgcctcagcccagcgcctgtcactgctgctgactcacgtgcccctgtcttggctgagcatgcgttggggctgggacccccggcgggcggcctgctggcacttggtggccctgttgggggtcgtagtgaccgtctgctttctggtgccggctgtgatctttgcccacctcgaggaggcctggagcttcttggatgccttctacttctgctttatctctctgtccaccatcggcctgggcgactacgtgcccggggaggcccctggccagccctaccgggccctctacaaggtgctggtcacaggtgagctgggtggctagggcagggctttgaggaggacctagccctgtccctgggggagttaaaggctcacagtcccactctgggacttccaaaagggatccaaccccaccctgcagggtccagtagaactgcggccccgcctggaaaatctgagccccaggatgaccaacgccccttctccgcctttacagtctacctcttcctgggcctggtggccatggtgctggtgctgcagaccttccgccacgtgtccgacctccacggcctcacggagctcatcctgctgccccctccgtgccctgccagtttcaatgcggatgaggacgatcgggtggacatcctgggcccccagccggagtcgcaccagcaactctctgccagctcccacaccgactacgcttccatccccaggtagctggggcagcctctgccaggcttgggtgtgcctggcctgggactgaggggtccaggcgaccagagctggctgtacaggaatgtccacgagcacagcaggtgatcttgaggccttgccgtccaccgtctctcctttgtttcccagcatctggctgggatgtgaagggcagcactccctgtccccatgtcccgggctccactgggcaccaacataaccttgttctctgtcctttctctcatcctctttacactgtgtctctctggctctctggcattctcgctgcctctgtctttccctcttgctgtctctgtttctcattctctttcatgttccgtctgtgtctctcaattaaccactcgtcaactgctgattctactgggctgtgggctcagacctcatttcaggcaccagattggtcgctacaccctggacaagtgactgcccgtctctgagccttgatttcctcagctgccaaatgggaagaatagaagaatttgcccctaaacccctcctgtgtgctggccctgtgctagacagtgctggagacatagttgggggtggagaactgcccttatggagcttgcagtccagtgaggtggacagacctgtccccagacagtgatggcccaaaatggtcaggactttaatggaggaggtgaggtgttgaaagcacaggcagagtggtcagggctgaagtcggagaagcatagggactaggcccaatccagcctggaaagtcagggaggacttcctagaggaagggacatcgaactaagacctgaactatgagaaataggcaggaagaagttgtacctgactcatttttctcaggtgtctccagggagcaggacccatggagggacccctggtgtaggcctgggcgatagactcttcctcagcagcctggcaggcaggaaacagacataggaccccagcccagatctgaatggcatgggaggtgctgcccttaaccatgacaccattgtaagagctgtccacatttgtatgttgtgccctggaatcagcctggttgagctcaaatcccaacttagccacgtctggcctgtgtccttgggcagtcacactacctctctgattttgtttccttatctgtaaaatggtgatcatcataatacaacttcaaaaggatttcaggctgagtgtggtggctcacgcctatacacccagcactttggaaggctgaggaaggaggatcgcttgaggccaggagtttgagactagcctaggcaacacagtgaggccttatctcaacaacaaccacaaaatctaaaaattagctgggtgtggtggtgcatgcctgtgatcctggctacttcagaggctgaggtggaaggatcacttgaggccaggagtttgaggctgcagtgagttatgatggcactgctgcactccagcctgcgggacagagtgagaccctgtctgaaagaaagagagaaagaaagaaagaaagagagagaaagaaagaaagaaagaaagggaaagatggaaggaaggaaggaaaaagaaagagaaagagagagagagagaaagaaaaagaaagaaaagtaagaaagaaaaaagaaaaagaaagaaaagtaagaaagaaaaaaagaaaaagaaagaaagtaagtcctggctaacacggtgaaaccctgtctctactaaaaatacaaaaaattagccaggcgaggtggcaggcgcctgtagtcccagctactcgggaggctgaggcaggagaatggcgtgaaccccggtgggggcggagcctgcaatgagccgagatcgcgccactgcatccaacctgggtgacagcaagactccgtctcaaaaaaaaaaaagaaagaaagaaaagaaaagaaggaaagaagcggggcacagtggctcagtcctgtaatcccagcaccttgggaaggccaaggtgggaagatcacttgaggctaggagtttgagacaagcctggccaacatagcaagaccccatctctacaaaaataaaaattttaaaaagggctggggcatttgagctgggtcccaacagtagacaagtagaaaaggcatggagagggcataccaggtgggaggagctgtgtgcaaaggcctggagatggaaaagcatgctggccaccagcttctgacaagcagtttagtatgaacggtatgcagggaaagagggaaggagggcagaggggtgcgcacgagcacccgttagtgtccttaaatgaccagcatgggaacctggtctctttcctgagggccctagagagccatggaagggtttagagtaggagtgggtcatggttaggtttgggttttaggatgatccccctagttgctctggagaggtggagcagagcgggtactgaggctgggtgcctgtgggaggctgaggcaggaatgaagagggagacgatgggcctgggctgagccatggaagggaggaggggtgagtgcgggcacactcaggagccaagtggacaggccatagcccccacagactggagggacgcggctagggaatgtcccacagagtggccagttatccctgagagaaagagcaggttttagcggagacgctgaggctgctttagaatatggtgggtgtgtggggcaaaagggacacccaggggtgtatcaagaggtcatagggggcaggccaggtggctcacgcctgtaatcccagcactttgtgaggccgaggcaggtggatcacctgaggtcaggagttcaagaccagcctggccaacatggtgaaaccccgtctctactaaaaatacaaaaattagctgggtgtggtggcacatgcctgtagtcccagctacttgggaggctgagacagaattgcttgaacctgggaggtggcggctgcagtgggccgagatcacaccactgtactccagcctgggcgaaacagagactctgtctcaaaaaaaaaaaaaaagtcataggggctgggcatagtggctctcacctataatcctagcaaatcgtagtactttgggaggccgaggcaggaggattgcctgagcccaggggttcaagaccagcctcagcaacataaaatacaaaaaatacaaaaattagctgggtttggtggtgtgcacctgtggtcccagctactcaggaggctgaagtgggaggatcacttgagcctgggaggtcaaggctgcagtgagctgtgattgcatcactgtactccagcttgggtgacagagcaagaccctgtctcaaaaaaaaaaaaagaaaagaaaaagaaaaagaaaaagaaaatatgtatattggatatactatgtgccaggcacgattccaagcccctgatacattctctacattttacagatgggggaaggaggtccagagatgttaaatacttgcccaaggtcacacagaaagtggaacactgggatttgaacaaggttttggttgggcatcttttcctatgggagctcagaaatatctgttgtctagccctttctcagcctcccaaccttctcggttccttacctatgtcacagctgactttgagctaaagtcatctcggggcagctaggtgcctatgtgagctggcgttcatttctcactgtttctccttccaaatacctccaggaagaaaagcaagtcctttttggtccaagacattaaaaaagccaggctcagcggctcatgcctgtaatcccaacacttggggaggctgaggcaggaggatcgcttgagcccgggagctggagaccagcctggacatgttaacatagcaagacccctctacagaaaatgttaaaaatgagctgggtgtggtggcgcacacctgtagtcccagttactcaggaggatgaggcaggaggatcacttgagcctaggaggttgaggctgcagtgagccatgatcacactactggactccagcctgggccatagagcaagaccctgtcctaggagaaaaaaaagggccaggcacagtggctcacgcctgtaattccagtactttgggaggccgaggcgggcggatcacaaggtcaggagatcaagaccatcctggctaacacagtgaaacccgtctctactaaaaatacaaaaaaattagctgggtgcggtggcacgcacctgtgatcccagctactcgggaggctgaggcaggagaatcacttgaacccaggaggtggaggttgcagtgagccgagatcccaccattgcactccagcctgggagacagagcgagactccgtctcagaaaaaaaaaaaaaagaaaaaagtgtgtgctaaaaaattcatcaggtactaaagagtgtacggtggaaagtaagtctttctcctacactcagatcatggatggatgtctcaggtcttcccaggcacatttgatgttatgtaccagccatatgcatgtgtgtgtcatttatttttcactctacacaagtagtacctaatatggtgaggttgttatgattacagactctggaggcaaagttcctgggtataaatctgaactctgtcactcccaagctaagtggctttgggcaagtgatttcacctccatgtgcctcagtttgctagtctgtacaatgggatggtaatagcacctacctcatggacttgagaagtcagcaacttcatacctctaaagcccttagagctagcagtgtgtggcactcaataaaatgttgactaatgatgattctcacttctgtactatgctttttcgtaccaattataaatattaatattttaatgtcacctttcttttattcatgtttctgtaccttgcttttgtcaccaacacagtgtaattcagagataatttcagagacatacaataggtctttttttttttttttcttttttgagactaagcctcgctctgttgcccaggctggagtgcagtggcacgatctcagctcactgcaacttccacctcctgggttcaagcaattctcctgcctcagcctcccgagtagctgggattacaggcacctgccactatgcccggctcatttttgtatttttagtagagacagggtttcaccatgttggccaagctggtctcgaactccagatctcaagtgatccacccgcctcggcctcccaaagtgctgggattacaggtgtgagccaccacacctggccacaataggtcttatatcttacggtgtctcctctaggacacatttcccataaataatttcaacatcccctgttgatgatacgtgggtgttttccagtcttttgctggtacaacaatgctacagcaaacatcttatggtttaagatctaatgaagggatcgaatgaggcaggagttcaagaccaccctgggcaacatagcaagaccctccctgtacaaaaaatttaaaaattagctgggtgtggtggaacaccagctagtcaggaggctgcggcaggaggatcacttgaacccaggtgtttgggactagcttggacatcatgtgagacctcatctctgctggacatggtggctcatgtctgtaattccagcactttgggaggccgagatgggaggattgcttgaggccaggagttttagaccagactggtcaaaatggtgagaccccatctctatttttttttttttttaaaagatgaataaaggtcgggtgcaatgaagcacatctgtaatcccagcactttgggaggctgaagcgggtggatcgcttgaggtcaggagttcgagaccagcctggccaacatggtgaaactttgtctctactaaaaatataaaaattagtcgggtacggtggcagatgcctgtaatcccagctactcaggaggctgaggcaggagaattgcttgaaacggggaggtggaggttgcagtgagctgtgatggcaccactgcactccagcctgggcgacagagtgagactttgtctcaacaaaaaaaaaaaaaaaaaaagggaaaaaaagaagatgaaaaagaaacccccatctctaaaaaaaaaaaagtaaaaataaaacaaattaactggatatgatgactcgcatctgcagttccagctacttgggaggctgacatgggaagatcacttgagcctgggagttcgaggctgcagcgagcaatgattgcgccactccactccagcctgggtgagagagtgagaccccgtttctaaaaaaacaaaataaaaaaaaaagggctctggtacatggctactgagtttcttcccctagaagatgtcaccgttccctagcctgcgggggtgggctggggtgggaaggatagaccaccatcatcggttcatttacataaaacaactattatatgcggtgcctggcagggctgggggacaacagaggcagagaaagccatacaccctgccctcacggagcttgtgatccagtggaaaagaaacacccatttccagtcatgagtggcctagaggggccaagaggtaggatgagggctggtcatgtatcacagagaagacctaaaggaaggaaagtggtgggccctgttaaaaagcatggaatggtattccagagggcattactgagtctgcacaggtctggagcatgcatggctcacacctgaccaaggatattcaagtcgctccatgtgaccagactgtggaccacagaggtctaagggggagagggcagatgagccagatagaatgacagggaggagagtatgaggggctctggaaaccgaggggtttggaagttttcctgagggcctagagggtcatggaaggttctagagcactggttctcaaggtgtggtctccagaccactagtatcagcatcacctaggaacttgccagaaatacaaattatcaggccccactccagatctactgaatgaaaaattctggaagtagccaggtagttactcaggaggctgagatgggaggctcacatgaggcctgaaattcaaggctaacctgagatagggtgttgctcttttgcccaggctgaaatgcagtggtgtgatcacagctcactgcatttccgtgtatttcagagctcactgcagcctcaaactcctgggctcaagtggtcttcctgcctcaacctcccaggtagctggggtcacagggatggaccaccacactgggctaatttaaaaaaattgttagcaacagggtcttaccatattgcccaggctggcctcaagcgatcctcctacctcagcctcccaaagtactgggattacaggtgtgcagcaccacatctggcttaatttttttttttttttttgagacagggtctcattctgtcgcccaggctggagtgcagtggagggatctcggctcactgcaacctccgcctcctgggttcaagcaactcctgcctcagcctcccgagtagctgggattacaggtgcccgccgccatgcccggctaattgttgtattttttggtagagacaaggttttatcatgttggccaggctggtatccaacttcagacctcaagtgatccgcctgcctcagctttccaaagtgctgggattataggcatgagccactatgcccagccagagactccatctttaaaacaaaaacaaaaactcagggtgtggtacccaccaacctggcttacccagccttttaggtgagtctaatgcatgctcaaatttgaaaaccactgggttaaacgtctggtctggagttcatcaaaaagtcatggcctgaatccttacctgtaaggcatcagaatgcaaatgaaaattaacttaatgaatattttacttgagccgggcacacttcccacaacagtataggatggctgtccttgtcctgttttgtagaggacggtgctaagcagcctattcattctcacaaggtctccaggaaaccacacttttttaaggagtagaattttggggtagggccgggcgcagtggctcacgcctgtaatcccagcactttgggaggccgaggcgggtggttcgcctgaggtcaggagtcgagaccagcctggccaacatgatgaaaccccgtttctactaaaaatacaaaaaataaattagccaggcgtggtggcgggagcctataatcccagctactcgggaggctgaggcaggagaatcgcttgaatccggggcaggggcgcggaggtttcagtgagccgaaatcgcgccacttcacactccagcctgggagaaagagcgaaactccgtctcaaaaaaatatatatatatatatatttgggtaggaagcacaagtagggaccgtgcttgctgccagaacaaccaatagaaactccttgaaggccttcctggcacaaacgtagtctccagcaccctctgccgaccaggccccgcgccctcagtgctgagacagcctccagccctcggtgccttaggggttgcgcgtcaccttggagaccgcgtgagaggagggcgtgcctctgcaaaggcggaagtcggctgtggaagtgtgggcggccattttgagaccgggcaagaggggcgggactggtgcggccgagtgacagttgaccggttttaaccaagtgactggtaccacggggccggggaaaaagctgtgccatccaggggcggggggatgccggggacggggaggaactaggaaggggaggggaaggggaaggcgagaaggggagaggcaggggaaagaggggaagagtcgtgggagctgggagaggagggaaagaggggaagagtcgtgggagctggcagaggagggaaagggggagccgaacgtgaagggcgaagggcggggcggggcaggagagtcggggtatagagcaggcaggtgttaatggcatgggaaggaagagtaagaagtggggcaagaaggtgtcgcggtacgaggggaaggtgagactcaagaaggtgccggctaagaagctggtgccggcgtggaaggagaaggtgtggggcgaggaaacaacgaagggcgaggaaagatcccgaggcgaagagacagttttcatcgagaaggggcagggcgaggaggaggggcgttaccagagggcgggacggggcgacgggcccgcgcgggaagaaccaatcgccgagaacccggggaaggaacgggtccataaagaccaagtggaggagtaggggcgcggtcaggagcggaagcagagtgaggagcaagccccgggcgagaaacgggggcccggccgggagcaagagcaggggcggggccgggagcaagagcaggggcggggcccggagacgggcgagaccaggtacagtacccagcccctgggcagaccccgagcgaggagaaagcggcgataccaagagaagtgcgagggtggggcaagaggttggggcacagccgggtggaagtacacgggtgcgatcgcaggcagaagcagtacgggggaacttaagagggggactgtcaaagcgagaaatagaaaccaagaccaggtgaagagcaagagtggaatacagggagggggcggaataaggagcaaggtgaggataaagttaaaggaagagacgtggaggcggcggggcggaacgaggcggaggagcaggggtgtggccagaaacattagtagggctggggcccggagcaatagcagaggtgcgatacccacgagggtcgggggcagggccaggagcaagagcaggggcgggaccaggagcaagtgcagaggcggagccaggaacaagagcagaggcggggctaaaagtccgtgcgggggcagggccaggagcaagagcaggggcgggaccaagagcaagtgcaggggcggggccaggagcaagagccggggcgtggccaggagcaagtgctgtgagaggcgcagaagcgaggtggaatcttaaaagtgggctccagagagctgtccggcgcgtgggtgttgactcctgcgttctccaggttctagccacgttatgtgcggcccagccatgttccctgccggtcctccgtggcccagagtccgagtcgtgcaggtgctgtgggccctgctggcagtgctcctggcgtcgtggaggctgtgggcgatcaaggatttccaggaatgcacctggcaggttgtcctgaacgagtttaagagggtaggcgagagtggtgtgagcgacagcttctttgagcaagagcccgtggacacagtgagcagcttgtttcacatgctggtggactcacccatcgacccgagcgaggtgaggggaccagggtcaagtgaaccagagggattttgaacccgcactccactcatttctggacgtgtggcctaacctctctttgcagaaatacctgggcttcccttactacctgaagatcaactactcctgcgaggaaaaggtgagtgggtgcagcacggataggctcattctatgagccttggttttcccacctctaacatttttatttatttatttattttatttttttgagacggagtcttgcgctgttgcccagactggagtgcagtggcgcgatctcggctcactgcaacctccgcctcccgtgttcaagcgatgctcctgcctcggcctcccaagtagctggaactacaggcatgtgacaccacgcccggctaatttttgtatttggtagagacagggtttcaccacgttgcccaggctggtctcaaactcctgacctcatgtgatccacctgcctcagactcccaaagtgctgggattacaggtgtgagccaccgtgcctggcccccatctcaatatgtggtagcaccatccaaccctggtggctttaaggattcaagaaggctgtctgtgtacagttcccagtaacccaccaagcacctagtaggtgctcaagtaagcttttttgttccatgttttttttgttttgttttgtttttgagacggagtctcgctccgcccaggctggattgcagtggcgcgatctcggctcactgcaagctccgcctcctgggttcacaccattctcctgcctcagcctcccaagtagctgggactacaggcgcctgccaccacgcccggctaattttttgtatttttagtagagatggggtttcaccgggttagccaggatggtctcgatctcctgacctcgtgatccgcccgcctcggcctcctagagtgctgggattacaggcgtgagccacctcacccggccttgttccaggtttttaaagctatgagtaggagtttaccatatatataattcacacaccataaaattcaccattgttatttttgttatttttctgaggcagggtctcactctgttacccaggctggagtgcaatggtgaaatcacagctcattgcagccttgacctcctgggctcaagtgaaccttctgcatcagcctcttgaatagctgggactagttgtgcgccaccacaccagcacgggaggatcacttgcatccagaagctcaagactagcctaggtgaatttggctgggcatggtggctcccacctgtagaaatgctaaggcaggatcatcataatgagcctaggaggttgaggctgcagggaactgtgatcatgccactacactccagcctgggtgacagagtgagaccctgtctttgtttttattaattaattaattaatttttgagatggagtctcactctgttgttggggtgatcagacccaacaccaggtcggggggagggggtggcgacgaagtccggcggagtcaaaggattgagaaaaaggcagtttgagagagagaagtaaagtgggaccagagggccattgctagtgtatggaggctgctaaagccccgagctctgggagcccacgctatttattggtaatccaacaaagaaacaggtggtgagaatgtggaggtcaaaagggcacattgcattaagcacatgatttacagctgtgatggtttagcatttgctctgctgcttgagataatggagagcaggttcttttaactcaagatacaatcaatcctgggagcgcaaggagcaagcaagtctagacacattccagagccatgagccctggattctatcgaggccatgagggattttatgcccttggcttagattatggtgcatgatggtaggcttccaccctttagcacagagcttggtgttccaaaggccacaaggggttttagaccctggaccccggacatgttccaagactcttttacattatgtcagacatgcaagccctgcctcagcttctcctaacactctgtcgcccaggctggagtgcagtggcgcaatctcggcacactgcagtctctgcctcctgggttctaagcgattctcctgcctcagcctcctgagtagcaggaattaaagtttttaattttggtgaagcccagtttataaatttttttcttttttttgcttgtgttttttgtgtcatttacaaaggccttgcgtaactaaagatcatgaagacttactcatattttcttcaagagatttttagttttagctcttacatttaggtctttcatccattttgagttaatttttgtatatggtgtgaggtccaagcttttacacgtgcatatccagttgtcccaatgccgtttggtgagattcttcttttttttttttgagacaaaatctcattctgccacccaggctggagtgcagtggcgtgatcttggctcactgcaacctccccctcccaggttcaagcgattctcctgcctcagcctactgagtagcaggaattacaggcatgcgccaccatgcctggctaatttttatattttagtagagacagggtttcaccatgttggccaggctggtctcgaactcctgacctcaggtgatccacctgccttggcctcccaaagtgctgggactacaggcgtgagccaccatgcctggcctgttgagattattctttccccgctgaattgtcttggcacctttgtcaaaaatcaattgaatataaatataagggtttctttctggactcaattctattctaaatgaattgatttctcaataattcattgctctaaatgcctattcatatgccagtatcacagagtctttttttttttctttttttgagacagggtctcactctgtcacccaggctggagtacagtggcatgatctcggctcagtacagcctacacattctgggttcaagcgattctcctgcctcagctgcccaagtagctgggactacagatgtgcgccaccacgcccggctaattttgtatttttggtagagatggggtttctccatattggtcaggctggtcttgaactcctgacctcaggtgatccacctgcctcggcctcccaaagtgctgggattatagatgtgagccaccgcgcccggccaataattttatttttttagagacagggtcttgcgctgtcacccaggctgaaatgcagtggcttgatcatagctcattgcagcctcgacctcctgggctgaagtgatcctcctgcctcagcctcccaagtagcagggactacaggctcaagccatcacaccagtgtactttcaattagacagggtctcactatgttgcctaaggctggcatgaaagaatttctgagagtagtattaataaatgcaaataataaaatgaggtaatacgttagaaaggaggggggggcactgttttagtgggggtcgttggagaaggtcactctggaaaggcttgagcagagactcaaatgataaaaagtggggattattaggagagccaggtaaagctttccaggccgagggaagagccagcacgatggcccagaggtaggaaagaggtcagcatgtgtgagaaactatgaagaggactttgtggctggagcagagtgagtgagagggagtgtgggaggagaggtcagggaagtgatgggggaaggtttttggggcttgatgggccatggtgaggacttggcttttactctgagacagagcctgagagggccctatgcagaggagggattggatctgattccaggcttcactggctccctcctgttgttgggggagcagggcaggagcagtgagacaaggaggaggctgctacattgcccaggcaggagatgacggggacaggaccagggtgttagtggctactgtcatcctcacaggaaggaggtccctgccccactagcaccttctcctctgcaatgggaactcaggcagggccagggacaggtgtagttgacaggattgaaaagagcctggtgctgggtgtggtggctcatacctataatcccagcactttgggaggccagggagagaagattgcttgagcccaagaattcaagaccagcctggacaacatagggagaccctgtctctacaaaaaaaatcaaaaaattgggccgggcatagtggctcatgcctgtaatcccagcactttgggaggccagggcaggtggatcacctgagttcaggagttcgagactagcctgaccaacatggtgaaaccccatctctactaaaaatgcaaaaattagccgggcgtggtggcgcatgcctgtaatcccagctacttgggaggctgaggcaggacgatcgcctgaacctaggaggcagagggtgcaatgagctgagatggcgcccttatactccagcctgggcaacaagtgcaaaactccgtctcggaaaaaaaataaaaaataaaaaaattagccaggcgtggtagtggtacctgtagtcccagctatttgggaggctgaggtaagaggattgctgaagtctgggagaggtggaggttacagtgagctgtgatggcaccactgcactccggactgggcaacagagcaagaccttatcttaaaaaaaaaaaaaaaaagccaggtgcagtggcttacacctgtaatcctagcattttaggaggctaaggctggaggattgcttgaggccaagagttcaagaccaacctggccaacatagcaagaccctgtcccatgtaaaaaataaataaataaataaataaataaataaattacagaaatagccagcctgggcaacagagtagactctgtctctacaaaaattaaacagttttcaaagaaagaatggcctggtggctcatgcctgtaatcccagcactttgggaggccgaagcgcgcagatcagttgaggtcaggagtttgagaccaggctggccaacgtggtgaaacctcatctttactaaaaatacaaaaattagctgggcatggtggtgcacgtgtgtagtcccagctactcaggaggctgaggcaggagaatcacttgaacccaggagacagaggctgcagtgagtcgagatcatgccactgcactgtagcctgggcgacagagtgagactccttcttgaaaaaaaaaaaaaaaaggaaaagaaaggagcctggcaaagaaagtaaagaaagtcagccctctcgatgaagggctgtgcacaggtgctgaatctggtaaatccctcgccctggtcccacagcaaccaaggcctccccttggtggcctgagtgccgccttctctcggggacgcctcttagccttcactggtgctgttctgcatgcctgaaacatccttctcctcttctcccatctccactctaagcgctccccacccttttctattcagccaggatcccgcatccctgggaggttgtccaggcatgccctgtcaccctcgtcctcagtcccttcctgtgtaatcgccccatcctacactcaccccaagctcaaggcccagaacttggctgtcctctgacttgcataggtggcagaaagtctgctgcagagagggtggaagcccacctcaagagtgagactgggggccagatgagatggctcacgcctttaatgccagcactttgggaggccaaggtgggaggctcacttgagaccaggagttcaagaccagcctgggcaatctaattttttttttttaagcctggaactgggaatccctggagtggaaagcagcaccctgggtgccacatccctcccaccttcccagcatccctcccacctgcacagttttgttcatcccatgctgcccttccctatgtattccctacatgcacattctgtctgcagacactggctctggagtcatctcctccaggaaggcctccgactccctccacagccccttacccctctgccccctcctaggctgttccatcccccatccaagccccaaacctagaccatgtcctctgaccatcacatggtggacagtgtgctgcccccggacagcccaggagacagactgttagaggcgggcttaaggcagggggcacccagaggctaccataaggacacacttgtggggccatctcaccctcagccctctgaggacctggtgcgcatgggccacctgacggggctaaagcccctggtgctggtcaccttccagtccccagtcaacttctaccgctggaagatagagcagctgcagatccagatggaggctgcccccttccgcagcaaaggtgggcctgggggaggcgggagggatcgcaacctggcaggggtgtggggtttgctgggggcctctgtggggccatgatctgaggagggtatgtggggggcgggagctcagcacattccatggcctagaggggccacacagaggccccagtgggacccatggcgtggaggcaggtatggggagttgtggggagatcccagggtggtctggggcctggaaccggccattgggaggccccagcagtttcagtgcccagggcctccctgcagagccatgcatggcagaagaagtgtgtagcatgagctggtacacgcccatgcccatcaagaaaggcagtgtggtcatgcgtgtggacatcagcagcaatggcctggggaccttcattccagataaaaggtaccctttcccaagacgggggctggggtggactccgggggaattcctcaccccagggtccccagaggagccagtgggagatccaagggagagaatggggagaggagaggcagctacgagctgtggaacccctgacactgggacctcacctgcgcctattctgcacctgctgctaggttccagatgaatatcaacggcttcctgaagagagaccgggacaataacatccaattcactgtgggagaggaggtgagggaatatggcaggggaaaaagacaatggtctgggccttaggctgacgccctggttacttcccagacaagcagcagatcccatttagggagcaccaacttcatgccaggccccacatgaagatcccattaatctccccagtgacctgtcgaggggacgtactctcacatactccattataaagaggagaaaactgaggtcccaaagggatggaaccattttcccatagtccctcagcatggagggagtcttgaagttatctgtctgactcctatacacacctgtacatccatacctgtacatacatatatagtacatacctgtacatacatatatagtacatacctgtacatacatatatagtacatacctgtacatacatatatagtacatacctgtacatacatatatagtacatacctgtacatacatatatagtacatacctgtacatacatatatatgtatatacctgtacatgaacagacacacacacacacacacacacacacatatatatatatatatatatttttttttttttttttttttttgagacggggcctcgctctgtcatccaggctggagtgcagtggtgcaatcatggctcactgcagacttgacttcctgggctcaagcaatactcccacctcagcctcccaagtagctgggaccacgggcatgtaccaccatatccagctaatttttaaattaattatcattattattattattatttttgagacagagtcttgctgtgtcgcccaggctagagtgcagtggtacgatcttgcctcattgtaacctccacctcccaggttcaagcaattctcctgcctcagcctcccaagtagctgggattacaggcacccatcaccacgccctgctaataatttttttattttttgtagaggcaaggcctcactctgccacccaggctggagtgcaggggaacgacctcgtcaggctcaggtgatactctcacctcagtttttgtatttttagtagaggcagggttttaccatgttgccagggtggtctcaaactccggggctcaagtgatccgcctacctcggtctcccaaagtgctaggattacaggcgtgagccactgtgcccggcccatgcccatattcaattttttttttttttgagacagagtttcgctcttgttgcccaggctggagtgcagtggtgcgatctcggctcaccgcaacctctgcctcccgggtacaagcaattctcctacctcagcctcctgagtagctgggattataggcacgtgccaccacacccagctaatttttttttttttttgtatttttattagagatggggtttctccatgttggcaggctggtcttgaactcccaaccaggtgatccacctgcctcagcctcccaaagtgctgggattacaggcatgagccaccacgcctggcctcatacccatattcttaatcccgatgcattcacccattcattgatgcagtcactcagcaggcacttactgagcacacgttgttgcatcatggggacacagcagtgaacacacagacccaaatctctgccctcctggagctgacactctagtgggggagacagatggcaaaccggcaaactggtaatgtgaaaatcaagtgaattctgtagtagggtaaagggcggtaagcgctctggagagaaatggaacagggcaacgggagttgggtctgtgcagaagaagagtgcaatatttaatgggatggtcaagaaaggcctcattgaggaggttaagcttccaaggagagaattgcatggatactaagggaagagcagttcatcaggagaaacagcatttcatcaggagaaacagaggccctgaggtgggcatgttcctgggaggtctgagaagcagagaagaggccttgtggctgggagagagggaccgagggggagaatggtaaggaatgaggtcaaggaagtgagaaggacaaatcgcgtggggccttgtgggtccaggtcaggccttggacctaaatgagatggagtctcaggagagtggggagagtgttggcgtccctcctgtccctccttggcagctcttcaacctgatgccccagtactttgtgggtgtctcatcgaggcccttgtggcacactgtggaccagtcacctgtgcttatcctgggaggcattcccaatgagaagtacgtcctgatgactgacaccagcttcaaggacttctctctcgtggaggtgaacggtgtggggcagatggtgggcggggcgtcttggagggagctgggcctcagcccctgaaataaggtaggggcctggggctctagaagtccccaaagacatatctgtccccatgagaggcagatagcatgaagaaaaaacacaagattctacagccagagggcctaggttcaaaccctggttctgccacctcctggctgcctgaccctggacctggcagttcaacgacccggtcttcagattcccatttgtaacatgggagtaatatttatatttacttcataggattgttgtgaggatgatataagttaatagtttctggccgggtgcagaggctcatgcctataatcccagcactttgggaggctgaggtaggagaatcgcttgagagcaggagtttgagaccagcctggacaacatagtgagaccccatctctaccaaaaatacaaaacttagccaggggtggtggcatgagtctgtagtctcagctgctcagaaggctgaagcaggaggattgcttgagcctgggactttgaggctgcagtgagctatgatcacaccactgcacttcagcctgggagacagatcgagaccctgtctcaaaaacaaacaaacaaaaaaaactgggcgtggtagtgggcgcctgtaatcccagctactcaggaggctgaggcaggagaatggcatgaagccgggaggcggagcttgcagcgagccaagattgtgccactgcactccagcctgggcgacagagccagactccgtctcaaagaaaaacaaaaaaaaaaagttaatagcttccataaccaatggtatatatgtgccattacattctacactctggaaaattctgcattgcaatatacatctctgcccaagggtttcctattaggcattgagagcctatattatcccagaatagggagggagtgtctgaagtaaggatcttttggcttcagcgacagaactatgttggaattagtgcagctacaggagaacgccaaggcaggttggtttacccagagaactggctttaagaagtgcacccacagccggtgcagtggctcacgcctataatcccagcactttgggagaccgaggcgggtggatcacctgaggtcaggagttgcagaccagcctaggcaacatggtgaaaccctgtctctactagaagtacaaaaattagccaggcatggtggcaggcacctgtaatcccagctactctggaggctgaggctggagaatcgcttgaacctgggaggcggaagttgcagtgagccaagatcgtaccactgtactccagcctgggcgatagagcaagactctgtctcaaaaaaaaaaaaaaaaagattgccttaacctcctcccatcaaggtcaaaagccctactcacaatttctgaggatcccacgtggattagtattctcctgaccccttctggctctgaattcctgcttatgtggaatttgttcagtttgtggaccatcttcctgtcctgtgtcagctttctctgttctgagccaagtctattcagacattgtttaatttacaccaacttttttttttaagagacaggcttttgctctgttgccgaggctggagtgcactggtgtgatcatagctcactgcagcctccaactcctggacttaaacgatcctcctgcctcagcctaccaaatagctggtattacaggcatgcgccaccttacctggctaattttaaaaaattgtttgtagagacacggtctcactatgttgcccagactggtcttaaactcctgcccttaagcaatcctcccatctaggcctcctaaagtgctgggatcaccgtgcctggccaatttccacaaacttcgttttttttttttgtttttttttttttgagatggaatttcactcttgttgcccaggctggagtgcaatggtgtgatctcagctcactgcaacctccaccccccgggttcaagtgattctcctgcctcagcctcccaagtagctaggattacaggcatgcaccaccacacccagctaattttgtatttttagtacagatggggtttcactatgttggccaggctggtctcgaactcctgacctcaagtgatccacccgcctcagcctcccaaagtgctggtattacaggtgtgagccatcgcacctggtcatagagaaggtgtttatattcacaggaatgaaaacaagttcaatgtgaattcaggcatccaaattcttgttccttattttttttaacttgttgaagtgaaatccataaatttaaccattttaaagtgaacatcagtggcatctagttcattcacaatattatgcaaccaccaccactatctacttccaaaaaatttccatcactccaaaataaaccctgggtttgtttttatttcatgtcagacaggtaatgggccgacaccataacaaggcttgagggagacacatctcagatgacggtgaaaacccaatcgccacacgtagaaactacaagaagatcctatgatcctgttttagttctttttcttttttttctttttgtcatggtctcactttcttacccaggctggagttcagtgatgcaatcttggctcactgcagcctccatctcctgggttcaagccatcctcctacctgagcctccctagtagctgggactacaggcgcatatcaccatgcctggctaatttttgtatttttggtaaagatggggttttgccatgttgcccagcttggtcttgaactcctgacctcaagccatcctcctgcgttggcctcccaaagtgctgtgattacaggcatgagccaccgtgcccagccttgttcttgttctctaaccaaggagatttctccctgatggcctcatctgtttgtctcctctcttccctgctcctgtctctctccaccactcccttccacactgcccccaggaaacgaatcctcccctggctcatggttggggtccaggtatagatgctgtaacaaagagaccctggaagggaattacttaaacagagactgttgctcattgtttttttttgtttgtttgtttgtttgtttgtttgttttttgagacagagtctcgctctgttgcccaggctggagtgcagtggcataatcttggcttactgcaacctctgcctcccaggttcaagtgattcttctgcctcagcctcccgaggagctgggattacagccacccaccaccacacctggctgatttttgtatttttagtagagatggggttttgccatgttggccaggctggtcccgaactcctgacctcaaatgatctgcccgccttggcctcccaaagtgttgggattacaggtgtgagccaccgcacccggccgttgctcattctcgtaacagtctggagatgaggaaccttgttccttccattttctctcttcaccatcccctgggctcaaggtgttggcctctgtatgatggcagccactgggaaaggggaggagcagaagtagagggcaagccattttcttttaagcaaacttcacttccactgacattccactagtgagaaggggtcacctggctacatccaactgcaagggacactgggtggtacatgcccagctaaactcaatcaccaaaaaatatggggaaatggatttgagagctttactagccatctcctaaaagtggagaagaaaatttattggttcacgagaccagatttcaaacagtatcactgagacggggtttctcgcctcatctcttggaccacattcctctgttttttgtttgtttgcttgctttttgagacggagtttcgctcttgtcacccaggctggagtgcagtggtgcaatcttggctcattacaacttttgcctcctgggttcaagcgattctcttgcctcagcctcccaagtagttgggattacaggcacgtgtcaccacgtccagccaatattttgtatttttagtagagatgggatttcaccatgttagccaggctggttttgaactcctggcctcaagcaatccacctgtctaagcctccaaagtgctaggattacaggcactcggccacattcctctgtattgacttgatgctcaaaacagtcctgttggctgggtgtggtggctcaggcctgtaatcccaacattttgggaagccaaggtgagcagatcacttgagcctacgagttcgagaccagcctggccaacatggtgaaaccccgtctctactaaaaatacaaaaattagccaggcatggtggtgggcacctgtaatccgagctactcgggaggctgaggcaagataatcgctggaacccgggaggcagaggttgcagtcagccaggattgtgccactgcactccaacctgggtgacagagtgagatcctatctcaaaaaacaaacaaacaaaaaatggtcctgttttctggaactgaagactacagaggctgcatcttctcaagcccacattcagtgggaaagatctttcccaagaatcaccacatccccaaagtcacaagattccttccacttggtacagctcaggtccctaccaccccaacaaagccaacacaatcaccatgcccaacatgatgcctagtgaattaaatgagtcagaactttccaatgaggctgaggcgggaggactgcttgaagccaggagttcaagaccagggcaatgtagcaagactcccgtctacacagttatttatttattttaattagctgggaggccgggtgcggtggcttacgcctgtaatcccagcactttgggaggccgaggtgggcggatcacgaggtcaggagatcgagaccatcctggctaacatggtgaaaccctgtctctactaaaaatacaaaaaattagccaggcttggtggtaggtgcctgtagtcccagctactcgggaagctgaggcaggagaatggcgtgaacccgggaggcggagcttgcagtgagccaagatcacgccactgcactccagcctgggtgacagagcaagactccgcctcaaaaaaaaaaaaaaattagctgggaatggtggcaagcacctgtagttccagctactcgggaggctgaggcgggaggattgcttgagcacaggagttcaagaccagcctgggtaacatagcgagacctcacctctacaaaaataaaaattaaaaaattagctaggcatggtggtgagcacctctcttgccagctactcgggagactgaggtgggaggatcgttcgagcccaggagtttgaagctgcagtgagctatgatcataccactccagcctgggtgacagagccagatccagcctttaaaaaaaatgtcccttggggcgagcatggggtgttgtatccatgtaggtataacactgactgtagccaagggcacaaggaccgctaaggaccgttgagcatgctgtgcactgcccaactccagggggcacacgaagcctgaactggctcaggcctgggtcacctgcttctctggtccatatgggggaggtttggctaccaaggtgctgctgcggggtgagcagggagagcgccctggggcagctacatgtgtccctcccaagcagctgtcagagcaggagcttccccgcaaggcaggacatgggggctgaggccaaggccacctgctcaccactagcctctgctcccctgcagctgagcattgacagttgctgggtgggctccttctactgcccccattctggcttcacagccaccatctatgacactattgccaccgagagcaccctcttcattcggcagaaccagctggtctactattttacaggcacctataccacactctatgagagaaaccgcggcagtggtgagtgtgctgtggctggacccacgcctggggagggcaccctggtgaacccctccactgaaggtggctgggggctggaattgctgtgggtgaggcattggggaaggaacttgccaaggccccaaatcacccttgcccaccccgaatgggccttgccttgcccttttttttttttttttttttttttgctgggatgaggcttccacccagaccctcctgggaattgtgagcagctgtgagaagagggggtgcgagagtaaagggaggtagagagaggcagacccacgcgtgtgcccacacacagtggcagaaggacttgccaagacagaccagacggggagagaaagtcagagggagaggggcatggcaaatcagaaagacagagcgggaggagagagagaaacagatgggcaaagcctcaagggaaactcattggagaggaaaaaagagagtctaggcacagtggctcaggaggccagactattcaagaggctgacgggagggggcatcgcatgagcccaggggtttgaggctgcagtgagctatgatcacaccactgcactccagcctgggcgacagagcaagaccctgtttcaaaaaaaaaaaaaaaaaaaaaaaaagctgggcatggtggctcatgcctgtaatcctagcactttgggaggccgaggcgggtggatcacttgaggtcaggagttcaaggccagcctgaccaacctggtgaaaccccatctctgctaaaaatacaaaaattagccgggcattgtggtgggcacctgttattccagctactcaggaggctgagaaaggagaattgcttgaacccaggaagcagagcttgcagtgagctgagttcacgtcactgcactccagcctggccaacagagcgagactcagtttaaaaaaaagagagaggaaaaagcgagagagatgaaaaagagagactattcaacttaatctttaaatgataccgtggctgggtgcagtagctcacacctgtaatcccagcactttgggaggctgaggcaggtagatcacatggtcaggagttcgagaccagcctggctaacatggtgaaaccccgtctctactaaaaatacagaaaattagcaaaattagctgggcgtggtggcacatgcctgtagtcccagctactcgggaggctgaggcaggagaatcgcttgaacccgggaggcggagcttgcagtgagctgagatcgtgccactgcactccagcctgggcgacagagcgagatgccatctcaaaaaaaaaaaaaaaaaagaaaaaggccaggcgcggtggctcacgcctgtaatcccagcgctttgggagggcggatcacgaggtcaggagtttgagaccagcctggccaatatggtgaaaccccgtctctactaaaaatacaaaaattagctgggtgtggtggcatgtgcctgtactcccagcttctcaggaggctgaggcagaagaattgcttgaacccaggaggcggggctgcagtgagccaagatcgtgccactgcactccagcctgggcgacagagtaagactctgtctcaaaaaaaaaaaaaaaaaaaaaaaaaaaagataccaaagctctcttatttcttccagtttctcccgccatctcagtgagaactgtcagcttacagagtcactggaaattggactgtaacttacatttcataagtgaatgcgtgttcccagcagctttgcttagtctctttcttactttgggcattttgacagtgggaggaaccaaattcaaattggcttaatccaaagaaaagtggtgtttattggcttccgtggctgaaaagcccaggagcatgttggtttcaggaaaggctgcaccatggggtcactgtcacggttagacagtcacctccttgtgcatgccacggtgattcaggcctctacgcagcaactgtagacttttatgcccctcagtagccccagaaaagagcatcttgttgcggattgcaagctgatattgcctctgatttggccggcttggtcacatgctaatcattgtggcctagggagtgcaagggaggtgtcagcccaatctgaccctcatggacagagtgtgagcaaggaggattttctcaaaggcagcgggtgccctctgccaggtgctccctgacaccacactgaacgggtgcttcagcatgagaggacagataacaggctcactaaagccagggaaatgtgggcagggggcagaggccccagatccaaccacctgggtctgaggccccatactgacttcactaggcagttggattcgtgtcctggccagcgagtgcatcaagaagctgtgccctgtgtatttccatagcaatggctctgagtacataatggccctcaccacgggcaagcatgagggttatgtacacttcgggaccatcagaggtaagggtgtgggcctctgtcagccccagggacccctccataccctctctcacctccgagaattctaaccttgggccctcactcattaccatgtgccctgaggagggcccctaggctgagggtgatggtggtggtggagggatgcgtttgtaggggtagggcttgggggtatgttatgtatctttcatgatgtacttggttttaaagggcagaagagctgggcacagtggctcatgcctgtaatcccagcactttgggaggctgaggcaggcggatcacttgaggtcaggagttcaagaacatcctggccaacatggtgaaaccccatctctactaaaaataaaaaaattagttgggcgtggtggcaggcgcctgtaatcccagctattcaggaggctgaggcaggagagtcacttgaacccaggagatgaaggttgcagtgagccgagattgcaccactgcactccagcctgggcaacagagtgagactctgtctcaaaaacgaacaaacaaatcccccaaaaaaacaaaaatagcagaagcccaattcaaaaataattgaagtacagctgggcacagtggctcatgcctgtaatcccagcactttgggaggctgaggtgggtggatcacctgaggtcaggagttcgagaccagcctggccaacatggcgaaaccccatctctactaaaagtacaaaaatcagctgagcatggtggcatgcacctgtagtcccagctacttgggaggctgaggcatgagaattgctcgaacctgggaagcggaggttgcagtaagccaagatcatgccactgcactccagcctgggcaacagagtgagactgtcttaataataatgatagtaataataataataacttaagcacaaagaatttgtggacttacataaatgaaaagactacggttcaacttcaggtatggctggatccaggggcccacagggtaggtcatcaggactccatctcttggtaaggtagtgcagcatagtaattaattatagcacagattctggagagagactgctccatcacaccttcgctgtgtgcctctcgatatgtaacttgacctctctgatctcgttttcttcacctacaaaatgtggctaatggtagtactagcatctaggtcaccgggttgatataaagattaaataagttggtttttgtaaaggtcttagtgctagtgatgtggtgagtgttacaaacagtttattattattggtcctataatttgggtccatttttaggtagctattcctccatggaggttaaaggtggccccttaaagcttcagactcaagtcacctactagtctgagtcacgccaagagaatgaagacagcatctttcccattaattctaacacaaatcccagagtaaactctgatcggcccaccgtgggtcacatggccagacctgaggcatgagacccacagtctcatgactgtgaccaaagacagacatgctctgataggccaggtgtgagtgacgaaaggccagagaatgagatcccaaggacggaggggctggtgggcataaggagggcaatcggagttggcttgatgggctgccagacaggagggagagggcctgaacatgaacccgaccttgctctgcagatggccaggtgtcctttgagatgctgcccaggcagtggtctgtgtgcgagcagataggaggtactcattaccccgatgggtctgcggtgggaggctgggggaactgaggatgcagaagagcaggggagggtggcaggggtcatgggaaagaatgggcagtgtcttagggaggggtgagttatggggaggggtacagctggcacaggaccaaggctattgagccctggggcggctctggactgcccctttccctctcagttaccacctgctccataatttggtctgaatacatcgcgggtgagtatactctactgctgctggtggagagtggatatggtaatgcaagtaaacgtttccaggtggtcagctacaacacaggtaatgagggtgatgcaaggggctgggcacaaaggggcaggatcccagactgtggactgcatgcccatcctgagggatctgtgcccagcagacagagggagggcaacattacctgtgtcactcctggttgaggagtagcagtggagaacaggatataggcttggtgatctgaaagggccctgtggctcacaataaagagattttattttacctgcagtgagaatagggcccctatgtagatttgtgcaggctgtgcagtgcacaaaacccccaaccgaggggtcagaggagacaggtcctgtgccttaacaggactgtttcctctcaggcagtgcctttttataattcacatgaagaaattctaaagggctaggcaaggggctcacacctgtaatcccagcactttgggaggccaaggccagaggatcccttgaggccaggagttcaagaccagcctggggcaacatggcaagaggctgtctctacaaattaaaaaaaaaaaaaaaaaaaaagtagctgagtatggagtcgcacctgtagtcccagctacttggaatatacctgaggtgggaggatagcataagcccaggaggttgaggctacagtgagctatgatcatgctactacctgggtgacagagcaagacccggtctcaaaaaaaaaaaaagagcagagccaggcgtggtggctcgtgcttataatcctggcactttgggacaccaaggtgggtggaatgcttgagctcaggcgttcaagaccagcctaggcaatatagcgaaacctcatctctactaaaaatacaaaaattggccgggcacggcggctcacgcctgtaatcccagcactctgggaggccgaggcggggggatcacctaaggtcaggagttcaagaccagcctgactaacatggtgaaaccctgtctctactaaaaatacaaaaattagtcgggcatgatggtgggtacctataaacccagcaactcaggaggctgaggtggaagaatcacttgaacctgggaggcagaggttgcagtgagctgagatcatgccattgcactgcagcctgggcaacagagcgagactccatctcgaaaaaaaaaaaaattagctgggcatggtggtggtgtgcgcctataatcccagctactccataggctgaggtgggaggatcacttgaaccgaggaggcagaagttgcagtgagctgagatcacaccactgcactccagcctgggcgacagggagatcctgtctcaggggggaaataaaagaaaagaaactctaaggactagcaaacccgagtgggaagctctttggagggttttacaggaggctgagaagcaaacaacttgctccagctccaggttttgaaagtgcagggcctcaggagattttgctgtgttctccccacctgtagctagtgatgacctggaacttctctaccacatcccagaattcatccctgaaggtaggaagggaaggcagacgtggcctcagggtggctgtgggccaggaggggcccaggtgactccacttcactgctgtgtcctctcttcctctgctccggtcagctcgaggattggagttcctgatgatcctagggacagagtcctacaccagcactgcaatggcccccaagggcatcttctgtaacccgtacaacaatctgatcttcatctggggcaacttcctcctgcagaggtgggcctctaccacccctgggtgggccaggcatactctgtctccccagcaactttacggtggggaccctttcaagcccaggctaggcaagtctcaccaagccttcaaaggatgcacaaatccagaagttaccaggactgtgatgaggaacacaccgttagggtagtcagtgctgggatgggggaagccaatgttttaaagctgtgggagcccttttcttaaaatgaaaccttatataaagacccagcctgtgtgagcaatagatgagcagtttctagggtttttttttgtttttgtttttgttttgggacagagtctcactctgtcacccaggctacaggacagtggcaaaatctcggctcactgcagcccccgcctcccagattcaagcgattctcctgcatcagactcccgagtagctgggattacagctgcatgccaccatgcctggctaatttttgtatttttagtagagacgcggtttcaccatgttgggcaggctggtctcaaactcttgacctcaggtgatcctcctgcctcagcctccgagagtgctgggattacaggtgtgaaccaccatgcccggctaattgacaaacattttctagggacagtttaggatcctccccaccccagccaccctctcgaccctcaggaacctaggggcccctgagccaccttcttgggtggctggcaaactgccaggttggcccaatgctcctgttttacagatggggagctgaagattctcaaagggtttggggtggggggcgggagctaggatttcaagcttcctttgcatgttcttacaagtggagaaacagtaagtggctcccgtgttattaggcctgggattgggggaagcggctgtccagcatgcgcctagctctccatctctgtccctgcagctctaacaaggaaaacttcatctacctggcagacttccccaaggaactgtccatcaaatacatggccagatcgttccgtggggctgtggctattgtcacagagacggaggaggtgggctgccccgcccctctccccgttccctctctgcccacccccaaaccccaggggcccctctttcccccgtcacagtaaaggagccaagggaagggggcaccctcggggaccctgagaaagggcagtgaagctccatttataactgaaactcctggaactcagggtaagtgtcagctccaaagtcacgcagaccggagctatgatccgatgttcagaggcggccctctttcatcccacagtgtggtcgttcacttcataaatattgagcatttactgtgtgcctgcccccgtgctggagaacacagagtgatcagggctgcaatggggaaaatattacctatggaagcagggggacctggccccgtctgggggcttgtgcatgtcagggagggcttcatgggggagaccacatggagggggacatcttggaggctggaggggatcccccaggttgtggctcaggaaggggagtgaaggttcccttcagatgtgtatgggggtgggcatcagtgcagagatgggaaactgaggccagggaaatggtgagaccctggaagctgcaaagagtgagaagaaaagaggtctcggctctaggaaccgtggctgttagggagtgtgtgtgttagagatgcttaggtcgcaagtgccagaaacccaaacagaccgaaaacattgaaaaaagtgatcatagtgtgtgagggctggaaccagaggtgattgggctcagggaagtagagccgtggcaccacagagaaaaggaaggggagcgcccttggtcccagtggaggtgagtttccaaacttcatccctcaaacaatggggccaccacactgggcagagggtgaggtgggatcagaggaccccatggtcctgacacacacacatccggctgtcatacccgcagatctggtacctcctggagggcagctaccgggtctaccagctgttcccttccaagggctggcaggtgcacatcagcttaaagctgatgcaacagtcctctctctacgcatccaatgagaccatgctgaccctcttctacgaagacagcaaactgtaccaggtgcccggtggagctatgcggggacatcggggcaccccaggagggctgaccccagctcacctggccctgccttccccctgcagctggtgtaccttatgaacaaccagaagggccagctggtcaagaggctcgtgcccgtggagcagcttctgatgtatcaacagcacaccagccactatgacttggagcggaaagggtgagaagacaccggaccatgacaggggtctgagggctcccggcactgccctcctgaagctaccattcttgagagaggggagaccgagctaaccccagtgaaaacctcagggctatgatggcaggagttcagcacttatggaagctcagaggaggagcccaacctagtggggggaaggtgcatcagggagggcttcaaggaggaggaggtgtatgcactgtggcaagaagggtgaggaaggattagccaagtgataaggtggggaagggtgttccagaaagggggaaccacctgtgcagaggccctgatgggagggggacaaagtgagcctggtggtcatggggagaaacttgggcttcatcttgagggtcttgggagagccatggatgggactaagggaaaggactgcaggatcggattttaccgcgtgccgtaatgatgcctccggtcatcgtcctgcggagggtggatcagagcaacccagggaggcagctggagtcgggacagggaaggggcgctggggtggaaggaggaagcaggagatggaataaagataagaggtcaagtggacaggcagatggcgactgcccgttgagtagggaggactctggtctcagggatcaagggagggacgtccgaggggatgtgtgcagaggcctctgggcagcaggggctgacgctgaggaggaagattcgggctggattcgatacgggaagtgggtggggtgggaaagaggcctgcggaagcttccagtgcgcggggtgccttagagccagcagcctttcccccttgccactgcccaggggctacttgatgctctccttcatcgacttctgccccttctcggtgatgcgcctgcggagcctgcccagtccgcagagatacacgcgccaggagcgctaccgggcgcggccgccgcgcgtcctggagcgctcgggcttccacaacgagaactcgctcgccatctaccagggcctggtctactacctgctgtggctgcactccgtgtacgacaaggtgggcgtccggcggcgggcgggcaggcctgagacgggactggggcagccgggagctggcttagagggcgaggcctgtggagcggagcgcagcgggattggagaacaggactggtggtgggtgggcgggggacctgggggcggggcctggcttgagcaggacttccaggggaaggcgttgggggtgtggccgggttgaaagcagggtttggggatgggctggggtgtgtatcttctgctctgggttgggggctggctttgaggctaggaggtggtctggggatgccgcttgcctggaggctctcgccccgctgcccaatcccttcacggtgccgggcgatccctgcagccgtacgcggacccggtgcacgaccccacctggcgctggtgggcgaacaacaaacaagaccaggtaggcggagcggattgggagccgggaaaggggcggcgcccggacacccctcaccgtgccccacccccggcgctgactctgccccgcgcatccggtaccccaggattactacttcttcttggcgagcaattggcgaagcgcgggcggcgtgtccatagaaatggacagctacgaaaagatctacaacctcgagtccgcgtacgagctgccggagcgcattttcctggacaagggcactgagtacagcttcgccatcttcctgtcggcgcagggccactcgttccggacgcagtcagaactcggtctgcgcgggaccagagtggagcccgaagggcggggcgagggctaccagaatctgggagcctggggggcggggacaccatcggaggggcggggcctgtctgtgagggaggccttaaccccgtttactgcccggagcaggcaccgccttccagctgcatagccaggtggacgtgggcgtggtgctggccgaccccggctgcatcgaggcctcggtgaagcaggaggtcctgattaatcgcaactcggtgctattttcggtgaggccccccggggagttgggatcaagggaggttttgttttttttttttttttttttttttggagacagggtcttgctctgtcgctcaggctggagtgccagtggagcgatcactgcattcttggcctcctgggctcaagcgatcctcctccctcaacctcctgagtagctgggactgcaggcacgcaccacagtgcccagtgaactttttgtttttcttttgagacggagtcttgctcagtcgcccaggctggagtgcaatggcacgatctcggctcactgtaacctctgcctcccagattcaaccgagtctcctgcctcagcctccctagtagctgagattacaggtgcatgccactacacccagctaattttttgtattattagtagcgatggggttttaccatgttggccaggctagtcttgaactcctgacctcaaataatctgcccactttggcctcccaaagtgctgggattacaagcgtgagccactgcacccagccttaactttttattttttgtagagacgggggtctccctatgttgcccaggctggcctcgaattcctggactcaagagatcctcatgcctcggcgtgaggtgtgaggtgtgaggcatgaaccaccctgtgcttggccccgttagcctattccttttttttttttttttttttattgatcattcttgggtgtttctaggacaatagtggagggaaggtcagcagataaacaagtgaacaaaggtctctggttttcctaggcagaggaccctggggccttccgcagtgtttgtgtccctgggtacttgagattagggagtggtgatgactcttaacgagcatgctgccttcaagcatctgtttaacaaagcacatcttgcaccgcccttaatccatttaaccctgagtggacacagcacatgtttcagagagcacagggttgggggtaaggtcacagatcaacaggatcccaaggcagaagaatttttcccagtacaaaacaaaatgaaaagtctcccatgtctacttctttctacacagacacggcaaccatccgatttctcaatcttttccccacccttccccgctttccactccacaaaaccgccattgtcatcatggcccgttctcaatgagctgttgggcatacctcccagacggggtggtggccgggcagaggggctccccacttcccagcaggggcggccgggcagaggtgcccctcacctcccggacggggcagctggccgggcggggggctgacccccccacctccctcccggacggggcggctggcctggcgggggctgacccccacctccctccaggacggggtggctgccgggcggagacgctcctcacttcccagacagggtggctgccgggcggaggggctcctcatttctcagacggggcggttgccaggcggagggtctcctcacttctcagacagggcggctgggcagagacgctcctcacctcccagatggggtcgcgaccggacagaggcgctcctcacatcccagacggggcagcggggcagaggcactccccacatctcagacgatgggcggccgggcagagacgctcctcactttccagagtgggcagccaggcagaggggctcctcacgtcccagacgatgggcagccaggcagagacactcctcacttcccagacggggtggcggccgggcagaggctgcactcttggcactttgggaggccaaggcaggcggctgggaggcggaggttgtagcaagccgagatcacgccactgcactccagcctggacaccattgagcactgagtgaaccagactccgtctgcaatcccggcacctcgggaggccgaggctggcggatcactcgcggttaggagctggagaccagcccggccaacaccccgttagcctattcctgagtagaaaatggcagccttccgttttcctaccagccaccacctcgccccagctatgggttatttgaactgtttgttggactttggggagacctgttcaccccttcatttctgcctctcccctccttcaaccccagattacgctcaaggataaaaagctttgctatgaccaaggcattagtggacatcaccttatggagacttccatgacggtcaatgtgaggtccaagcctggaggggagggtgcaggatggtgggaaagcctgggccggcggggatcaccatcttcacctgctcctacccacaggtggtgggttcatccgggctctgcttccaggaaacacacctggggccccatatgcaagtattggagcttgggatactgggccctgggaggggaaggttggggtcgggtctcaacagggctaatccccctgagaatcccactaatgcattcataatttcctttcttctcattctttctcaacattcatccacccacccactaccacccactaactcctttcattcttttttctttaagacggagtttcactcttgttgcccaggctggagtgcggcggcgcggtcttggctcactttgcctccttggctcaagtgattctcctgcctcagcctcccaagtagctgggattataggcgcccgccaccacggctggctaattttttgtatttttagtggagacagagtttttccatgttggccaggatggtcacaaactcctaaactcaaatgatccacccgcctcagcctcccaaagtgctgggattccaggtgtgagccaccatgcccggcctaactcctttcattcattcacgttttcagaaagggccaccttcccagttgtgcaggttgcacacaaactggtatgttccctctgataacttttcttcagagggagaatagagtgagcaacagggccgttttttttttgttttttgttttttttttaacgatgtctcactcttgtcccccaggctggagtgcaatggtgcaatctcggctcactgcaacctccacctcccgggttcaagcgattctcctgcctcagcctcccaagtagctgggattacagttgcataccaccatgcctagctaattttttatattttaaatagagacggagtttcaccatgttggccaggctggtcttgaactcctaacctcaggtgatctgccggccttggcctcccaaagtgctgggattacaggtgtgagccaccgtgcccgacctagggccactttttgcaattggcacaaaggtggcataagggctggcctggccctgctttcacatctctctcttcttctgcccactcacacattcctcattcagttctttgggtgcttggtgcttcacttgcttatacacgtgatatcgcctttgcccggggcagacactgaggctcagagaggtgcagagtaacccagggagctaataagtggtagaggaggggcgtgccccagagttcttgttctcacccatttccctacccactccctggcatgcagatcctggtgttcctccctcctggcttagaatgaccttgggcagtcaaaaggggttgtaacagcccccacctccttagagtacatgagatttcatgtgctagactgaataaacaaggaggaagtgtgattgcatcagggtgggcaagggggaacgtggtgggatgagctcggagcagtgatggggcagagtaagcggagcccttatgggccatggtatgtgagctggctcctcgggagggctctaagcagaggagggactcgggtgtccccagggcccatctggctgcatggggtggggggacatcaatgaggggactggaagcagggagactctggaagagacaaggttggacaaaacagggtgggggcaaaggagttggaggtttaggggagagaacaggcaggctctcggtctttttttttttttttttgagacagagtcctgctctgtcacccaggctggagtgcagtggtgcagtcttggcctctacctccctggttcaagcgattctccagcctctgcctcccgagtagctgggattacaggcatgcaccaccacacacccagctaattttttgtatttttagtagagacagggttttactgtgctggccaggctagtctcgaactcctggactcaagtgatcagcccgcctcggcctcccgaagttctgggattacaggcatgagccactgcaccaggccgtgttaatgatattaatgaccatattgcccttgggggtgagggagagccaggcagctggtggtggtgtttgtgggagggggactgtccttcctgccccttacccctccaggggcctgaggagaccctggccacccctgtgagccttttttcctcccaccgagggcaacctgatggtgccagtgttcattggctgccccccaggcaagcgcctggccttcgacatcacctacacgctggaatacagccgcctgaagaacaaacactactttgactgcgttaacgtgaacccggagatgccctgctttctcttccgggacagtgtgtgtccagtcccttcccctgcacagttcactgccctcttgcccccactactttgtgctctccctccccattcctctccccgcagactacccaccctttttcctgcggcatctcactttcccccgtctcggtcctcagcttctcgggccaagctaatttcttcttctggtctcaatcccctccaaccccatagttttctaccccttcttcttgattcaagatttggtgacaggagactccggcagtttccagggcaggtaaaggcgtggccagcttgcagctagggcaggtggagggagtggaaggagatgggtgcaggactcgagacccggaggccagtctgtgtgcacttctgtccctggtagctatgttctgctggtggtgggtggcgggcccacactggacagcctcaaggactacagtgaggacgaaatctaccgcttcaacagccccctggacaagtaatccccgtggggtcccacgtgtaatccaccttgcttcccctggaggcctttcccacttccaagccaagcccacctcgcaagcccccacctctgcgtctcaggccctgcccacagtggggctcttaggatctcacaggcaaactcctgcccgcccctaacaccatgtcccctgcacccacctgtggcctccctccacactgaccactgaggtcatacctcccctacaccgccccccaacccctggctgagatgacctgggcctgcacaggaccaacagccttatctggaccacgaggaccacaaggaccaccaaagactcagcctttcacatcatgtcccacgagagcccaggcatcgagtgagtgcgtagcctggcccctcttggcccccatctgtcggtagtccattgggcccacctatcctttctgcccctaggaggcctcttgatccccaagtcacactgactgcctttgtgttacttaaatggggctgaactttgcacaagctgaagtctctgcctggaatgctgctccctccgactcttttcaggccttaggcagatgccccttcagccaggaggacttttctgtttcaagatgggacaattgtcccttcatggctcctatggcctcttggggctctcccatcctggccctgagccccctacctgtgcgtccccatcccagagtggacagctctgggcagtcactgtctggtgtggggtctgtctctcctccagaactgggtcctgaatagactcataaatttgtttttatttttgagatggagttttgctctttgttgcccaggctggaatgcagtggcaagatctcagctcactgcaacctccaccttccaggttcaagcgattctcctgtctcagcctcctgtttattttttgagacaggctccctctgtggcccaccaggctggagtgcagtggcacaatctcagctcactgcagcctctgcctcctgggttcaagcaattctcctgcctcagcctcccaagtagctgggattacaggcacccgccaccatgcctggctaatttttgtatttttagtagggatggggtttcaccacgttggtcaggctgatcttgaactcctgacctcaggtgatccgcctgcctcagcctcccaaagtactgggattacaggcacatgccaccatgcccggttaatttttgtatttttttttctagtagagacggggtttcaccatgttggccaggctggttaacatagcatgtattgaatgaaagaatgaacaaatgaataaatcaattcgtggcaggcatttattgatatctgaatgggggtattaatgaatgaataaaacaatggagaaacaaattcatatataggggctcagtaagtttcattcaatgaaaggaaaaaaatgaagccatgagcaaatgaaggcagtgaatgaacgaacaacttgcacctagtcagaatttaacctgctttattttttatttttatttatttttttgagacagagtcttgctccgtcacccaggctggagtgcagtagtacaatctcagctcactgcaacctctgcctcttgggttcaagtaattctcccaactcagcctcctgtgtagctgggattacaggtgcatgccaccatgccccgctaatttttgtattttttgtagagacggggtttcaccatattggtcagtctggtcttgaactcctgacctcaagtgatccacctgcctcggcctcccaaagtgctggtattataggtgtgaaccactatgcctggcctaacctgcatttattggataatgaataaagaagggaataaatgaaagatgtgactttgtacctagtaagtgctcaagctatatttatgggataaaggaatgcaagcagcaaagaatgaataaggatttggcatatgatagatacacagcctgtaatctggatggatgcacagtgacagaggaattgacagatggaggtgtgaaggcaggaggaaatgaatgagtagacaacctgtggcacagtaggcgttcagtcagcatgaatgaatgagtgaatgaaggaatgaatgagggaaggcatgagattgcacccatttggtcctcaccgaaaacattgggtggaggaagaaattgggagttggcacagactaggcatggttggtagcacaactgcctgatctttggcttgcaggtggctctgtctggagaatgccccatgctatgacaatgttccccaaggcatctttgcccctgaattcttcttcaaggtgttggtgagcaataggtgagccaggcaagtggcccaggtgcgggtcaggggctgcccatggaatgcctggcttctcctctaatcctggatcccctcccaacccctgcagaggagtggacacgagcacctactgcaactaccagctcaccttcctgctgcacatccacgggctgccactcagtcccaagcgggcccttttcatcatcatggtgagtggctgtccgggagctgccctactgggtgggcaggggcccacgcctccatacctatgcttgttataccttcgctcattcattcctttattcactcatctagccatgctgactgaacgcctgccatgccacaggctgtctactcattcatttcctcctgctgtcatgcctccatctgtcaatttccctgtcactgtggatgcagattgtggactgtgtaccttatcatgtgccaactccttactcattctttgctccctgcaggtgtcagctagcgtgtttgtgggcctggtgatcttctacatcgccttctgcctcctgtggcccctcgtggtgaagggctgcacgatgatccggtggaagataaacaacctcattgcctcagaatcctactacacctacgcctccatttccggaatctcgagcatgccgtctctgagacattccaggatgggctccatgttcagctccaggatgacagaggacagggctgaacccaaggaagccgtggagagacagttgatgacctgagtgtcccacctgccccagcccccagttactgtcacgcctctcttatgaggcccatcttgaagatgcaacctgtcacccagcccaggcctctctttctgttttgcttgatgtttacttctcgttcagactcaaataaagccttttttcaggaccagcagtgggctctcttaaaagctcgagttcagaaggtttgtaccagcatagctgcacattaaaatatcataaacctggctgggcatggtggttcatgccggtaatcccagcacttcgggagatcgaaggaggcagatcacttaaggtcaggagtttgagaccaccctggcccacatggtgaaaactcgtaaccctgtctctactacaaatacaaaaaattagctgggcatggtggtgcgtacctgtaattccagctacttgggaagctgagacaggataatcccttgaacctgggaggcagaagttgccgtgagccaagattgcgccactgcactccagtctgggcaacagaccaagactccgactcaacaaaacaaaacaataaataaaatatcaaaaaccttctaggccacctgttaaatagtggcttctctgtgtgcctgttggctgagcctctccccagtgtaccccagacctccctgtggtccagcaggatcctccacaatccaggcccattgctatggccgaccatctgttctgattgttcagtgttaaatattctgaatgtcaacacctatctaatgtcttaaggaggggaccctggagacgtcaggattcttattttagttgcaagtagcaaatatttccctcaaatggtctacatgaaaatggtaatttacaggcttcaggtacagtttgatccaaagtcccaaggtccacaggattcagccttcatttctctgtagttttttcttctctgtcctcctcagagtgcagtctctgacctcaggacaactcccctcaccatctgaggctagttatacagtccataatctggatggatgcgtagtgaccaatgaattgacaagatggaggaatgaaggcaggaggaaataaatgagtaaaaaaataccctgttgcatggtaggcatttggtcagcattaatagatgaatgaatgaaggagcgaatgaggaaaggtatgagattgcacctagttggtgctcacccagagtgttgggttggaggaatacattggggttggcattgactaggcatggttggtagcacaaaaacctgatgaaatttgacaataacaagagttggcaacactcatgtgtgtaagggctgctggctaaggttgtttccaccaccaagattctaccgagtcacctcatggtccaggtgaacacatcataatcctgtatcagccaagtcaacatgttatttaaatatcaccatctgcacttccagccaagatagagtgacagagactggatttcccctcatacttgaaactatttatgttttttgagatggagtctcgctctgttacccaggctggagtgcagtggtgtgatctcggctcactgcaacctccgcctcctgggttcgagcgattctcctgcctcagcctcctgagtagctgggactacagacgcatgccactatgcccggctaattttttgtatttttagtagagacggggtttcactgtgttagccagactggtctccatctcctgacctcgtgatctgcccgcctcagcctcccgaagtgctgggattacaggcatgagccacctggcctggccatatcaacgtggtattttgtttatttgtgtctttttctttttttttttgagatggagttttgctcgttgcctaggctggagtgcaatggtgcgatcttggctcactgcaacctccacctcccaagttcaagtgattctcctgcctcagcctcccgagtgagtaactgggattgcaggcacccgccaccatacctggatagataattttttgtatagtagagacggagtttcaccatgttggctaggctggtctcaaactcctgacctcaggtgatccatccacttcagcctcccaaagtgctgagattacagacttgagccaccacacccggccatcatttttgtttaaaacattttttaccaccacaacttctttcacatattaatttactcattaattcaacacatatataatttctttctttttctttttttcttttttctttttttttttttgagcacagtctcgctctgtcacccaggcaggagtgcaatggcgatctcagttcactgcaacctctgcctcccgggttcaagtgcttctcctgcctcagcctcccaagtagctgtactacagatgtgcaccaccacgcccggcaaatttttggtatttttacatttatttatttattttctctgagacagagtctcactctgtcacccaggctggagtgcagcggcacaatctcagctcactacaagctgacctcctgggtttaagcgattctcctgcctcgggctcctgagtatctgggattacaggtgtgtgccaccacgcacagctggtttttttgttttttttttttggtatttgcagtacagatggggtttcgccatgttggccaggttggtctcgaactcctgacctcaagtgatctatctgcctcggcttcccaaagtgctgggattacaggcatgagccaccatgcctggccaacaaatatttattgactgtctactaatatttgccaagcactgagatactgggaattcagtagtgaaggaaatcgtcctgccttcatggagatgacattctaaatggtggagacggagagtgaaagtcgggtttgagaaaaacgtgctgcccaggcgcagtggctcacacctctaatcccaacactttgcgaggtcaaggcaggaatatcgcttgagctcaggagttcgagaccagcctgggcagtataatgagactctgtctctataaaaaatttaattttttttaaaaagagagaaaaagcgatgttgaatgtgcagatgtaatatcaatcagtggaggaagaagttggtataagaagttgtgaatactggccaggcaaggtggctcatgcctgtaatcccagcatttcgggaggccagggcccagggaatcgcctgagttcaggagttggagaccagcctgaccaacatctactaaaaatactaaaattacgtctctactaaaaatacgaaaattagccaggcgtggtggcacatgcttgtaatcccagctacttgggaagctggggcagaagaatcacttgtacccaggaggcggaggatgcagtgagccaagattgctccattgcactccagcctggacaacaagagctaaactccgtctcaaaaaaaaaaaattgtgaatcctccacttacacatgacattgaaagccatagagctggatgagttttgtaactagttagttcatataagcttgggaaaaaaatgtggaaggatgcattgaaaaagactggagagggagccccaggtacacatcctagctgttagtcctttggaaggttacccagcctctcagtctgtctataaaatgagaataacacagctctccaaatggcacgacacccgctaccttttggcttggagacgctgccccgaaggcggaacctccaggacagctacgtagcgtcccgagcactcagactgaagccagggcagccatgttcattattggaaccgtgaggtgggtagggggggtggtgttgagacagctgtcattttcagttagggcaaaagccaacttccggtcaccatcttgagtgacgacagaggcggagctccaactgacatgttcattaagggcagggctccgagggcgccacctcgagagcgacggcgggctacccggggcgggctgaggcaggttgtagccccgccccgggccttgggctccacctctcggccccacttccgccgggcaagcgtttgtaggcggcgctgccgtaaatcaggcggtctgcttgccgcatcacgcaagatggcggccgcggcggtgaacggggcggcaggcttctcgagctccgggcccgcggcaacctcgggcgctgttctgcaggccgcgaccggcatgtacgagcaactcaagggcgagtggaaccgtaaaagccccaatcttagcaagtgcggggaagagctgggtcgactcaaggtaaagtcggcaggcccaggaaaccgagtgttgcgggcgtgggaggcgctacgaggtgtctggacccaaccaagtcccgggccgcggaagccacctcggtgccagcgagactgaggcgggctgggggatccgatggggtgaaagatttggaacagccaaagtgggggctcggagggcgtcaagaagcgagagagggacagggagcgttgatggtcacgcctgtaatcgcagcgctttgggaggccgaggcgggggagcgtcgcttgagcccaggagttcaagatcagcctgagcaacatagcgagactctgtctctacattttttttttaagtgagagatgactggaatggacccacgcgggggtggtgggggaatgattggaagacttatggcagaactgagtgaggggttagatttttggtgcgtggaggcttaactggtcggagtggcaggattgggattcgggcttttcctgatggtggattccaggcaagaccaagtgggaagtgaggactgcccggagtgataaaagaatgaggctgaaaaggtgggctgtgtagagggtgtgtggttaagaccaggctgggttaggatctgagagatctggggcttaggctcgcatctgttgggagagggggcagcctagttgtgaaggcaggactgaacctagaagaaatattcttacaagtagagaacaagaatacggggcccagagtgcttcagaccaaacatctgttgggagggagtgtaaatccagtggcttggaacaagctgctgagcctgctaaggaaagatgtatgggctgaactgtggggggagatttggacctccccctcccagatatagattttggggatagcccagctaccccttccccaatagattgtggggaagatgggccaagaatggaatgtactcctgtccccaccgccgcgtgattccactgggtcaggcactgagtgtccctccttgtttccccagtggggctattaataattgtaatgtgatgtaatcttaaatgggcatgtgttgcgtgctcaggccctgttctgagtgctttatgagaaagcattcctcatgagtctggatgatggttagctccattttccaagtgggaagaccagagcgtagagcaggtaagtcatctgtatttgaattcccttcttttctttcttccctccctcccctccccatcagctagttcttctggagctcaacttcttgccaaccacagggaccaagctgaccaaacagcagctaattctggcccgtgagtgtcactggggttggttgggggtgataatctgggggtcatggcaggaatggtagcactggtggttggggaagagacctcagtcacctcctgagagctcactctgtcacccacaggtgacatactggagatcggggcccaatggagcatcctacgcaaggacatcccctccttcgagcgctacatggcccagctcaaatgctactactttgattacaagtgagaatgggccctgcccccaactgggggggtggttgcatggaagctcctttatttctggagctctggctgcttgggtcctcttccttcatctgggaactcctcctggcttagttctctcctcagtggtgcagggtcagggcttggcttggaggtcctgagacttggcttgactagtcagtctccccctacccattcccacattgcaccccctctgcccagtggggctgccatcacctttcacgtgtcctggccccagccttgcccctctgactcaaacccctgtggcagccagtaggatcatgtgacactaaaatttgacactgtccataccccgctcagaacctgccgtggctcttcatggtcctcaggcacaagaccaagttctttcctgtggcttccaatgcagttccagctcacacccctctgcctgtgcctgctcatcccagccctttctctcactggactgtgagctttctaaaggcagagcttggaactgtctcagttactgctatgtccctagcactgcctaccacagggccaggcccagaacagggactcactggatatgtgttgaatataaaactgaatgatacctgcacagattaatgattgggaatttgacatcagacaaatctggctttgaaacatccagccgcttcctgattatgaggtcttgggcaaatgactttacctctctcagtttccctgttaaagtagggagtggtgattcttttatttatttatttttggagacagggtcttgctgtgttgcccaggctggagtgcagtggtgcagtcatggctcaccacagccttgacctcctgggctcaagcggtactcctaccttagcctctcaagtagctagggctacaggtgcacaccaccactcctggctcttttattttaattttttgtagagatgggggtctcgctttgttgcccaggctggtctcgaactcctggccacaagtgatcctcctgccttgggctcccagagtgttgggattacaggtgttgagtcattgcatctgactccaataactttttttttttttgagacggagtttcactcttgttgcccaggctggagtgcaatggtgcaatctcggctcaccacaacctctgcctcccgggttcaagctattctcctgcctcagtctcccaagtagctgggattacaggcatgcgccaccacgccctgctagagtccacccaggctagagtgcaacggctggatctcggtgcactgcaacctccgcctcccaggttcaagtgattctcctgcctcagcctccctcagcctcctgagtagctggtattacaggtgcccacgaccacgcccagctaatttttgtatttttagtagagatggggttttgccaggttggccaggctggtcttgaactcctgacctcaggtgatccacccgcctcggcctcccaaagtgcttggattataggcgtgagccaccgcgcccggccagtaactcttaatatagttatagctaacactttgtgtttatttgggccaggtattgttctaatcaccttacctgggttgaatcatttaattcacttaacccttgttcattcaacccatctctacgaaatggatactgtgaggccgggcatgatggcacatgcctgaaatcccagcactttgggaggctgagacaggaggatcacttgagcccaagatttccagacctgcctggccaacatggcgaaatcctgtctctacaaaaaatattgaaaaattagctgggcaggctgggcatggtggcttacacctgtaatcccagcactttgggaggccaaggtgggcggatcatgagcttaggaggttgagaccatcctggctaacacggtgaaaccctgtctctaaaagaaaaatacaaaaattagccaggtgtggtggtgggcgcctgtagtcccagctactcgggaggctgaggcaggagaatggcatgaaccgaggaggcagagcctgcagtgagccaagatcgggccactgcactccagcctgggcgacagagcaagactccgtctcaaaaaaaaaaaaaaaaaaattagctgggcatggtggtgtgcacttgtagtcccagctactttggagtctgaggtgggaggatggcttgagcgtgggaagttgaggctgcagtgagcctgggtgacagagcaagaccttgtctcggaattgaaaaaaaaaaaaagggctgggcgcagtggctcatacctgtaatccaagcactttgggaggccgaggtgggtggatcacgagatcaggagttcgagaccagcctggccagcatagtgaaaccccgtctctactaaaagtacaaaaaattagccgggcatggtggcatgtgcctgtagtcccagctacttgggaggctaaatcaggagaatcgcttgaacccggcaagcggaggttgcagtgagccaagaacgcaccattgcactccagcctgggcaacagagagagactccttctcaaaaaataaataaaaggatactatggtgatacccagtttacactttgggaaaccgaggttgtcatttcactgaagtgaggtcactcgctcttgtatgactcaatatgactcttgtaaatgacttattcatgcatctttgggacacagtttcctcatatgaaaacccaggacctgatacctcttcaggaagatgcatggggcgttgtgaggattcctggagcctggggtagagggctcgctaggcccttaaatcctccttaacctgcttccccatcccacgtccacagggagcagctccccgagtcagcctatatgcaccagctcttgggcctcaacctcctcttcctgctgtcccagaaccgggtggctgagttccacacggagttggagcggctgcctgccaaggacatacagaccaatgtctacatcaagcacccagtgtccctggagcaagtgagatggcaaggggcaggggaggacctggccaaagtgggtggtgcaggggtggtcttaggagggctttcctgaaggagtggccagggttcacccatctttccacccacggacccatcctcttgtttgtccaacaaatactgagtcccagctgtgtgcctggcactgtggtaggttgtcagactgtgcagtgagccaagcaggtgaaattcatgatcttgtggtgatgacactggggtgtggaagcagatagtaagcccgaagagtgagtggcctgcgcagtctgtcagatgctgagtgctgtggagaaaaagcaggaaggagggtggagaggcagggatgggtgatatttatctcggggagtcagaaggcctcacctaaaaggtgaaattggagaaagacttgaaaagggtgaggaactggcttatgcctgtaatctcagcactttgggaggctgaggcaggaggactgcttgagcccaggagttcaaggctgcagtgtgctatgatcacaccactgtattctagcctgggtgacagtgagattctgtctctatttagaaaataaatgaataaaaacatattttttaaagaaaagggtggccgtgcacagtggctcacgcctgtaatcccagcacattgggaggccgaggcgggtggatcacctgagttcaggagttcgaaaccagcctggccaacatggtgaaaccccgtctctataaaaatacaaaaactagccaggcggatggtgggtgcctgtaatcccagctactcgggaggctgaggcaggagaatcacttgaacccaggaggtggaggttgcagtgagccaagattgtgccattgcactccagcctgggcaacaggctcaaaaaagaaaagaaaagggtaagggactgaaccctgtggacagccgggcagaggaaccagccagtccaaatgtcctgaggcagtactgtgtctgctgtgttcgaaggacagccaagaagacagtgtttttggaacaaagtgagcagggccagggcaaagccttaggacctaaggttaggaagttgttcctggagctgacatcttatgggaggatttggtcagtggggagaggatgggagagagggcagttagggcgggcagcacagttcgggcaaaggtgtacagggatgagcctgtggtggagccagcgctgtctccctcctggaaaatagatggataattggacagtagatgagataatgagatgccagcccagagcaggcttggggggagggagggagggaggaagagggggtgagagagagagagagagagtgtgtgtgtgtgtgtgtgtgtgcgcataaaccagcaagggctttctggaagagggggtacccagggcaggggtgtggctgtgtggcaaagggattacaggggcactaggagtgtgatgaggcccacacaggtaggcccctttgcagcctcctcttcattctctcttcttcccccttcccggcttctgcagtacctgatggagggcagctacaacaaagtgttcctggccaagggtaacatccccgccgagagctacaccttcttcattgacatcctgctcgacactatcaggtgcgtagcggggccgggccctgtggagtttggaaagaacttgggcttgagtcggacagctccgagtctgaatctcattccagccattggttgtctgggtaggctaggtgtgtttcttatcctcctagcacctcagctctccttttcagtgaattgggcctggtcatgggattgtggataacggctctcatctcaccacccttggctgttgacatgtgtggccacgtgtgtcaaacctgagcatggaattggttcagcaggcagggattgtgcggcctgtcttagcccatcttccgtcctagatacccatccagtgagtcatgagacttcacctccggccaccaaaactgtggaaccctcagtttctccttctctagaatgggttgaccaaatcccagcagccccttgggttgccgtgtgcacaagtgacatcccacgggcagatggatgtgacatacaaatcccttgaggagtaaaagggtgtcgaagtggtggctgagctgatgcactcgggcagagcaccaaatcagaatgagtttccatgccttaggtgcaaaggcaagcccagaggcattcgagtgaggagtggtagccagtacccactacctaccgcatggcctaagcgatattggaggcactcctccccatcactggcttttccccagagcttaccccctccctcactacagtgacttcatgccttgctctatttctacttcggtgttgttcgtggtgcctcttgatgggtacaaggaaccccctcaggatctatgaagtggggtgcagcaccctggtgatgggtgttatgagaagagatgccctcatgtgagtcccaagctgggtttcagacctgaaatcctgtggctgggagtgggattcagagtgtgggcccaggagtcagagatttcagtggggatcacccgtggcccttgcttgctttgcgagtctggtcaagtttctccccttctgagccttgatgaataaaacagggcccttcacatattcctgccatcagtgctgaactccagggtcagagctgacacatgtcaggtctggggggacaggtcctgggaggttgttgatgctcagtaatgaggagcttctcatcttcccccagggatgagatcgctgggtgcatcgagaaggcctacgagaaaatccttttcactgaggccacccggatcctcttcttcaacacacccaaaaagatgacagactacgccaagaaggtggctggggtacagggcaaggggccgtgggaccaaggggtgaagtcactaacaacagtgtggggtggcttagagggacactggaacaagactgcccaggtttaagttcaactgtgtgactctaggcaagctgccaaagctctctgacatcagtttctctatccacagaatggggctagatacatgggatgagcttagtacctggcagcagctggaggtgggcgctgcacgcatgttggctgctgtctttatcaaaatttcttagaggtggcagctttttctgcaagactttgcttcatttggtctcaggcgtttgagcacgagcaacgcttggtgttgcaggaggagggctgggaccaggctatggaaggtgaaattgggctgggtgcagtggctcccgcgcaccaaggtggatcctcccacctaggctcactctgggaggctgaggtgggaggatcgcctgaggtcaggagttcgagaccagcctggtcaacatggtgaaacctcatctctactaaaaaatacaaaaaaaattagccggatgtggtggcgggtgcctgtaatctcagctactcgggaggctgaggcaggagaattgcttgaacccaggagggtggaggttgcagtgagccgagatcacgccattgcactccagcctgggtgacagagcgagactctgtctggggaaaaaaaaaaaaaaaagaagaaggtgaaattgaattttagtgatggtgacagctggtaactgatctgtcactcaggccaaacactatcctcagtgctttaaagatgttgattcaccaaatcctcacagttgacccagagaggtgtgtaattagggtcccagtctcaacacagagaaactgaggcacagagaggtgaagttacttgtcaagggtcgttgggcagagtacgattggtgagaaaagagagcataggacacgtgggcaagtgctggccccatagggtggggatggagcctttgtgatcactctactcgtctctaatccctcctttcctgcagcgagggtgggtcctgggccccaacaactactacagttttgccagccagcagcagaagccggaagacaccaccattccctccacagaactggccaaacaggtcatcgagtatgcccggcagctggagatgatcgtctgagccccccgggcactgggtggggcagggcacgagttatttaaaacagttacactgcagggtttcgcccaataaaggtggactgacattccctcttccaggcccttgtctccccagttgggacggcagagagacaagttcttatatctgaagaacttggaggttttggggcattcaggagttggagatagcctccaactgggtcagcctctgtctggtgggcattgctcagggtctcaaacatggacgcccactgtggggccccagcagcactgtggcctgcaggagggcatggccccaggtagggggactgttctagccagctgtggacacataggaatgctggaccagggtaccagattttttcaacaaagggggtgaagtgtcctactaaaaagaataaatgttggcagtgaattaaacaatttttcaaatgacatgtgaaatggaacccatctgtaggctgccagtttgggctctttgtggaacaaaaggtgtgggccctggtgtgggcttgtgggtcccaccctccctgagccagcatgtgattgaggacctccccgcacaccccccagcctaggtttcctgccttgaaattcttgggaaggtgttcaaggcgcagggtccaaatctggctgaatcccttgtgggatgtggaaatttcacaagtcttccagagttagttttcccaactgtgaaatgggaatgatcactcctttgcaaagtggtttgtgctgagcctgtgagcttggtaccaggttagctcagaattggggcttatggattaaggggaatcagatcccccccgccctggacccatcagtctgggtgctgggtgaatggaacctcagttactgctgctctggtccagcttcacgattgtttccaagatgtgctttaatggcgatcctgccctgctgcaccctacccactgccttggcgagtgattgacaggctgctggcatctggattggttattttattggcatggaggggaaggtggagggtgttgagccgactacactcagttggaatgggtggcctgcaagtcgtagtgctccagcttggccaccagagagccggacagcttgatggtggcaacccagggtggctcgcccaggtggttggtggatgtgctcagcctagtgggggagggtagagtcagcaaagcccagcaatgggaccaggcctctagcccttctagggcctccctgtccccatatgaatagggaagcttctgaaggctatattggaatatcccaaaggcagtttagggcagggctgtggccacttaataggaaagggagctgagggctggcgagtgtcccagctaagcttcaagaggtccagggcagtctcccagtggttcagcactcccaggagtcagtatcagaccccagtggccagatctggtgattcagtgtgggtagggggtggctggaggatgcattgtccccctggatgtgggactcaggaggagcctccccagcacaagggctgggacatcagtgccctctggcggctgaagccttgagtcccagagtcaggagaagtcctcagaggctagaggggtcaggagtccagggctgcccctgtgcccagtaaagttggaggcgtgcatctacccccatttagttccaggaagacagtcatcccctcacccccatccctgagtggcctcggacgtggtcctccttgataccctcagggacagggtcaaggcagtgtatagggtcaggccagctgggaccagcctccctctctaatggctccaagagaggtacaggagggccaagagtccacttagggattggatgccatagggctgggccagggtgtccccctttccccgtcaaaggtcagcatgggatcatgggtcctcttggtcctgaagggtgggagctcagctaggtttgagatgtggcagagatgaaggccacgggtcattctagggtcaggaagccaaagggctgagtaggactctatccagcagtctggggttcggcaccctcctgtcccttctcccctctcaccaggcagagacgttgcgtggcaggcggcgatggcgtggctggtggtggcagtaacacttgcagggacaggagttaagcacctggaagggcagccagtggcgcgcagcgcgggtgttagctgccccagtctgagaggccccgctgccaccaccccctccaccactgctgtcaggcacggtagctgtagctcgttcgcgaggaccatctccatgcaagccatccttacgggtcgcgccccgggctgcacgggaacccttgttcctgcgcgtgcgggtcttgatgggcgcagccgcgggtgcgggcgcggacacaggcggcgagggctcagccacggtgggagctggagccggggatggggccggggcctggtcggcggctaaggctgggggcagagcaggggctgcggtgggagccagggctgactccttgtggcccagacccggggtgagcgggggagccaccggcagcggcgttggctggagcgctggtggctgcagtgtgggcggcggtgtgggcggtggcagcggtggtaactcctgcaggcctggaggccccgggcgcatgggctcgccattggtgggtgctgggaagatgaacgtaggcggcgccagcagggcaggtgcgggcctccggggcccgggagctgagtgtatctgctctggtggtggcggaggggagccccaaggcccagagagtgcggccgcacgccgtcgcggcgccccgatgcctccgccagccccgttgaagcggaagtggcgttcagggccgtcgggagcgctaacccagtcgaatttgggcttcgagcctgggaaggtggtgtagggtggcggcggtagggcccgggcttgggacgcaggcgccgagggaggaccagagcacccttcgccgtctccatcacctccctcggcttcctgtgcccctcgagaaacctctcccaaggggcgagcggctccaggaggcaggggcccttgcttcaggacctcggcgtaagagatggcacctgaggcagcaaagaggccgccgcctccgccgccccccagcgaagctttggctgctaaggaactcgaggctgccggaggggccaaagagggcctcgacttgaaggtgattttacacagcaggctcagaccggactcggaatccgcaggctgggccatttcgccttcgcccgcatggggaggcgcccctccgcgagccctgccggccgtctggccctggttgcggggcccagcctggctttctgtcgggggtgaggcgggtgtggccagagcaggagtgattctgcggtccgccggctgccgttcagaaggtaatggtggtggcggcttccaagtctccaggggcggcggaaattgggatggggccctcgggacagtgtccttcacggatagttgccggggcggcggcggcggcttcagcgggcggaggctcggagggtcgccctggccgcgatggctcgcctccagcaggcggcggatccggggaactggagtgcccgcgggcttttgccatttagacgggccgggcagcagagtccccgcgggggccgggggtggtgcagagaccgcggccgcctcttcaggagggggcatcactggagagggccgttctaaggtgaggggcagggtcgagggtgaggcctggggctcccggggtaccatgagtcccgggggtgtggcgctgccagggaaccagacacccagcccacgagtcaggcgcatggcctgggaggtcatctcgggctccaccagggacgtccggcgggagtcgggggcgcggtccgagggctgcacttttcgggagcccccgcccgcggatggctccgactgcaagttccccatttctgacggagctcggagactagtcagaaaaatttactccagtcagcctgccagggccgtggggaccctacgaggctggctgtacttgatctaatgcgtccgcaccggccccgcccctgttctccaagatccgatcaggcccaagtccttaggtcgcactcctgttccccgaccttcgacactcacgccttcttgcccatgtccccaacacagctgctgttaagatacttcactaccagccccattatgtactaaggttccatgcctgtccccttggctggtcatgctgatccctcagtcctctcctctaactctccgactccccgcctctctctagagcacctgggtcccgccctcttcccaggcaggggcagatcctcaggcctcacccctaaacctcttcccgctccaggtctactagctggcatccacagtcaagctccacccctgtccccaagctccgccctggccccgcctccccccagaggaacccactcaccgagtcctccagccgagcagagttcagaccgcggcgccctgggcccggggcagggcagggaactgccgtagcagaaaataaccgaaaagaacgggggtgcgggtgaaggcaagtgggcgagacaactagggcggaccccgagatgtaggccccgcccccggagctcgaggccccgccctcctgcgagcccgcgggagcccggccccttacgaacctaggtctccccttgaaatactccgaggtcttgttcctcgcccccaggccttctggttctaagctccacccctttgggttgttctccttagcccctcccctttagaatgtcccgcccctctcattccctcccgaggccccgcccacgcgaacaccgatgcgtcgctcctcccctttggacctctcatctgccccgcccctaaggcaatttacctctaagctccgcctttttaagacccggcaacatcgcttctcaagaccctctccttccccccgggcgccgagaaggcccatccaccgtgggcccgccccttcgtgacgcacgcactagtcctcgcctgcagcatccaaacctccttatacccaggccctccaaccccacccacttgtgaaggctcccctctcgccccaccccttatcgaactctgccaggcacccaagccacagcgtagaccaccacctctttagaaccttgagaccagtccctgtccctgccccgtcccctcctcatagcattagagaccaatggcgcagatgggtggaaaagtgggggatcccctctggatcttaagaaaatgggggctggggggttgctctctggagctagtgccgggctctaggacccagcaggcaagtaagcccgcctcgctcttacccctcccccaagccgccccttccccccccacccgtcttccaggttccccctccctcccccctcgccccggctcccggtgcccgtctccagcgccgccggagccagccagggagccggaacgaaaaggaggaggaggaggccgcgtcgccgccgctcggagcccggccggagcctcgcaggcaggtgccgaggggggcgagggggcgggggctgacagactgcctgccccgatgagggggcggccgtgaccgcgctgcgccttctgcccacccaggcgcccccaaggccccggctaggaggactagagagtggggaccccccaaactgcgcggcagccattcagggtaccagtcttcatttgtggggtctggactttctccgaggatgccccattcacaaaattccgtcctggaccctcaccgttgaggaacgctgaggaccactccccccgggggacacaggatgtgtggggagcgtaggccaccctgaaatgccagtgccccattccagctaggccctggggggacccctgctctcattccctgcttcacctgttgtcgggggaggcgggcggacaaaggaagcagcgtcacgtgactgctcattcacaaaatcccatcccattgagaaaagggggctgggggcgctgcagccgccccttcccctcctgaagggcccgggaaacccagcagcctgcaggtgggggagggggctagagctcgtccgggtccctaaggttgggacgccagggtccctgtgctggatggcagtgaagggctggacactgatcccgattactgggcggagggctacgtcctctgagctggggggcggggtaaaatggttctgaaggatgctggggctggggggcgggaagggaagagggaggaaggatcaatctgcccccccatcccatctttcccccctggcttccctcggctggggcctgggggagcagccttgatttttgtgaatgaaatgctctctggatgtgtcttcggtcgcccgtttctgacttcctctgcctccgtctccctctgagcctctctttctggccatttctggttctctccctgttccctgcccatctcccgttgctgggtgactcagtgagctttgcatccggtctcattcataaatccgggaaggggtgggtgggggggaaagagcctgggtttctcacccagcctgtggcctggacgacagggtgcggaggcagggttgggagaacaggagctgagttgatgggcccagagaaaatatatatgcgcaggcacccagctgtgagggggagcactgggtggggctgtgggtatgtgctgagggaggagaagggggtgatagggataagcaggagggggagggaagggcaacaccagggctatgggggtggggacggagagatgggggaaaggtgggtacagagagaaagggcagacatggagaagaagatagaggtgagagagaagagatggcatgaggaagaaaggagctgtgtggaagacggtggccatggggttgaaggtgggtattgctagcttagggtgcagtggacctggacgtgagagatgaagttggaggggagatgagggttgagggaacattccatgggagagcagggtttgagctcatgactgtgttgtccctgtccttccccccacctcctgcaggtacatggtgcgggtccgagctgtggtgatggcccgagatgactccagtgggggctggctgcctgtggggggcgggggcctcagccaggtgagcgtgtgtcgggtccgaggggccaggcccgaggggggggcccgccaggggcactacgtcatccacggggaacgcctccgggaccagaaagtgagccaccctggggcatgcggggagggtagggacctggggagggaggggagaggggctggcatgtggagcagaggtcaggttgcctcccagcctaggaatcaagctggggtgtgaagtttgggagtgaatatctgtcctgtagataagagttgggaattgcaggatacatggggtgtttggagggtcctgtccactgccacttccagccagactatcctcgctgtctccctgtactgctcctcctccccgctccaaccccaggctgttccacagggggcactgcccccccccccccgccccgactcacaccatgtccctcctctgctcaaaaccctccatcttgctcagagatccttgccacgaggccctacaccacctggcccctgtctgccctaagtatagtgaagcatttgctggggtccatttgaaagtgtcagagatggttgacaattctatacatgggttcatcaggaataactgggctgtcgggcacaatgtggagggacagtgttgaatcagtttcagctagggatgtagtagaaagatatggattgtgtgaaaggcttgggggaaaggttttttttttggagcaggagtcagtggagggatttgaaatggagtgaaggaatatggtgatactaggcaaggatttgagggaacatcaatagggtgttggctagcatctgaaggggaatctgtggaagtctgataagactgttttggagtaagtgctggctgggtacagtgcctataatcccagccactcatgagtctgaggccggaggaatgcttgagtccagagtttgagaccagcctgagcaacacagagagagctcatctggaaaaaaaaaaaaaaaaagagagagagaatattttttgggtaaagtttccagagattattatcagaagaggattcacaataatattgtgagatgttcagtaaagtctgggaagtattgttgagccagaggggggatgttgggttatcagaaaggggttaacaatgttttgggccattcagcaagattcggggtttctacaggggcatcagagggaggtattaggaaaatgtagggatcaaggggttgggaaaatatttgagcatcagaggtgtgttcagtaaaattgggcgtagctgggtgtgggggttcatgcctgtaatcccagcactttgggaggctgaggcaggaggatcacttgagactgggaggttgattccgtagtgagccctgatcacaccactgcactccagcctgggtgacagagtaagactgtttcaaaaaacaaaacaagtaaaactggggagtcgtatcagtgttgatcagagttcagggttacacttagggttgggaaatgaggtttgtgagaagacactagggtatgcatgggggctggtgatggacgagacgtcacaggcatgtctgggttggggtatctgaccctgctttccttctgcccctcagacaaccttggagtgtacactgaagccaggcttggtttacaacaaggtgaatcccatctttcaccactggagcctgggtgactgcaagtttggactgacgtttcagagccctgcagaggctgatgagttccagaagagcctgctggctgcgctggccgcactgggtcgaggtgagcagcccaggtgatgtgcactgtgggctggcctgggagcgggaggagaagctgggctcaaggaactcactctctgcctctctccctgccccaggctcactcaccccctcctcctcctcctcctcctcctctccttcccaggatactgcagagaccccctgccctctgacggtgagtgtccaggatgcctctctgctgggggagggtaggggttttgtttttattctatgaacattcttgagcacctactgtgtagcaggcaccatgccacacaccgggtacacaaaattgggccggaactatgagtgtcaattcaatcccagttattctagtctttctgccctgtcatgattcacacgttcattcaagggtccttattgtgtaccttctgtataccaggcagtgctttaggcactgggttacatcagtgaacaaaaagttcctttcctcctggagcttctattctagtgtggaaaggcagaaaattaaaaaaaatatatatataaacaataaaaatgaataaatattgaaagtaaatggatgaacaaattattgacaaccccatgcttccagttactcaggctctaaatcttggagtcatccctgactccttatcttttatgcgtctcatctcatctgtcagcaaatattggttctactttccaaatcatcacaatctgcctccaacctggtaccatccaaactcatctcccaactggaccatctcaatagcttctcactgtcaactccttccctcctgcccccacacatagccagaggatccctatcaacggctgagtcagatcatgcccctcccacactcagaagcctcccagggctccaactcactcaagtaaaggacaaagtccttacagtggcatatgagatcccatgccatgtggccctgtgtgtctggccccctcacttactcggcttcggccacatggcctcttcactcttattctaacgtggcaggcacagccctgccccagcgcctttgcactggctgttgcctggaacactctttcccagatttccttgtggctcattcccttgtttctttcaaggctttatacaaatatcatcttctcagggagggcctccctgagtatttaaacttaagtattccatttaaaattgcaatctgccaatgccccttgtctagtgctaaatttttcccatgttctaaggcattttccttatttcctttctgaaaatactattatctttttttttttttttttttttgagacggaatcttgcactgttgcccaggctggagtgcaggggcacgatcttggctcactgcaacctccacctcccaggttcaagggattcttctgcctcagtctcccaaacagctgggattacaggcacccagctattttttttgtatttttagtagagacgggatttcactatgttggtcaggctgatctcaaactcctgaccttgtgatctgcccgctttggcctcccaaattgctgggattacaggtgtatttcccggcctattttcttatctattagtttacggtctatctcccatgctagaatgtcagctccaggccggcaaggatcttttgttcgtttcttgctgtgtctccaatgcctgaaacagtgcctggcacacagtaagtgtttagtaaatatgtgttgaataaacggaatgaatgaatgcacataatatcgggtgcaatttggcacttgctggaaaccttgggagttgcctaaaacacctggaggaacaaaactgattccctgggcagaaaaggggagggttccagggtcatgggagatgaagtggggccacaacagttgcagacagttcccatccatggagcacttacccgggaaagatgctctgctgtccaggccccctctggaatctgcacagtggtcttcgtgagtctggcacgtcgtgggtgctcaatgaatgtctattgaaggcagtgtgcagataaggtaggagttatgtccaagtggcagaaaggaagctaagggtctgagaagtcgtttcagctagtttcagaacagaggctggtttgcatgggaaggggagcactcggagtgggcgggactgccccaataacagtgtggggctgggagtgagagaggaaggcagctggctgcccaggggagagggattctgagaagcgggaagacgattagatgttcctcaggtttggcgagctgattagatcaggagaagagtcccacaaaaataacaataaccatttccagctctcccagtacttcaggcatatgctgtgcccttgacagtggccctaaccgcatccttatgaataggtactcttaggatccccgttttacagaggaggaaactgaggctcaaagaggtgagctcacttgccggaggtcacacaaccagtcagtgacagagccggggtttgaacccaggccttcctggccgcagagccctcgctctcaatgggagggggtctatgtgagggcatcggctgtgcgggggcgtgtccccgcgctgaggccgccaatctcctccagtcccacgtggacagcgactcctcctccagtcacagccgccaggagactcctcccagcgccgctgcggcccccatcatcacgatggagtcagcttcaggcttcgggccgaccacgcccccccagcgccgccgctcctccgctcaggtgcgacctgggagcctggggctcctgggggaatggggcggtgcactcggggcccgaagggagcgggagccatggcccggggaggtggggaacacagattccaggggatggctgacctgataactgggccggactgggagaaagcggcggggaaatagggagaggcttggaggcctgggtttctaggaggcttgggtgcgggcctcccgagtctccttgcgctcttggagattttgaggggtttcgaagtccagagaggtttaggaccattttcagagtgtatatttggggaactcctggaagaggactgttaaattcacggggagggtgggagagtcggtacccagaagggtaaaagaggcccaggaaccaaactcctgcgcctttaaggaggaggtggctgggtccagaacccctggatctcaaggtagagggggctgggagctggggctcttggatcttaagagaggacaggactaggaaccttcggcctctgggtccttaaaggtgtggggttggtgcgtggattcctctgtctgtccctggagaaaagtggggattgagggaccttgggagagaagcaagctggggtcttgaaaatctgaatcccagacccaagagtgcgctagggaactggatccttgaggctaagactgggatggattctgatctgtttgtcccttcgttccgcagagctaccctccgcttctaccgttcacggggattccggaaccctcagagcccctggcaggggcagggggcctggggtggggcggccgcggctacgaggattaccggcgctccgggccacccgcgcccctcgccctgtccacctgcgtcgtgcgcttcgccaagaccggcgcgttgaggggcgctgccctgggtcccccagcggcactacctgcccctttgaccgaggctgcgcccccagcgccccccgctcgcccaccccccggcccgggcccatcctctgcgcctgccaaggcctccccggaagcggaggaggcagcgcgctgcgtgcattgccgcgcgctcttccgtcgcagagcagacgggcgtggcggccgctgcgcagaggccccggacccgggtcgcctcctggtgcgccgtctaagctgcctgtggtgcgccgagagcttgctctaccactgcctgtcggacgccgagggcgacttctcggacccgtgcgcctgcgagccgggccacccgcgccccgccgcgcgctgggccgcgctggccgcgctctccctggcagtgccctgcctctgctgctacgcgcccctgcgcgcgtgccactgggtcgcagcgcgatgcggctgcgccggctgcgggggtcgccacgaggaggctgcgcggtgaggacggcctggtgggtcccctagccggcccgaggacccaaaattgagggtccaggaccccggactccgttcggacctaaaacccaaacctaggcacatccggaacttggagcttgagtttggattgagagatctcagacctggaacctggaacccaaacctaggactgagagaccccagccccagcttcattggggtgtctgtctaagaagtcccaggcgtcctgagttctggcgttcccccacccccacaccccacgaggaggctccaggcgtccccatactttgcatctcagaaaggccagggagcacatagatcccgaaaagggcaggtccctgttgaaatgaacaacctagaacccggtcacgcctggcaccatgtccctcagattacagccccacaattagtcaggacttgcccataactggctctgcctttattcaactcccagatcagatcttgagaccataggacctggagtcacccacaaacagttcctgaatattcacctaagacctggtgcccccacatctgagacattctcatagtcccaggacccctgagacagcaggacccctgagaaagtttcaaacagagtttgaaactctgttatgctctggaatctccagatgctgcccctcaaatctacccacgacttagtgcccacagacctggcctccagtccgggaacactgaagtctaagatgtccagggaactcccagacaccctgggaccccagactcttaagatgcactgagtgctcggatatactgaaacacgagctgttctcttaccaaaatgacttgggagacccatcccagagcccccaagatccagatatcagacaccaagatgctctggaagccagggatcaaagacctccataggtccacccacccccaagccagggttctcaggagctttggatatcatttataggactcagaggtgcctggggtcctcagatgtgcgactgaaggccaccaacacctcaggacccgagatactggtctcgagttctcaaatagccctctcttgcagtccctcctggacctggattttgagaccccaaatgtcctggaatcttcagcttctttctacccacagattcccaaccccttaagggctgggagtccagctcccagaagaggggatgctcatggtgacccagacctctgatgcccttggccctcagcccttgagtgaccctaaggtactttaggagcactggatccaataccccaaaggtgccactgacccccaaatgcaaggctcaagaccctacaacattgggattgttcctgatccaagaccttcatccctccataccagaggcgttcagattcgaggtgccccaagaccccagcaccctcagaccccagatttctttggattcaaacctctctagtctgatgaaccccaagttgcctctacacctgattcccccatccccacttgtcggacctcagagacctgctgccccttgaatcctgtcatccataggcccctaaaaccccaaggttccagcctctggaattctggtcccaaggatcccagcccaagcccccagcaatcctcagaattacccctttatcttagggtgggatccctaccatttggaactcattgtaggaccacccagggtggggcacagtggctcatgccttgtaatcccagcactttgggaggccaagggaggaggatcgcttaaggccaggagtttgagaccagcctgggcaatgtagtgagaccgtctctaaaaaaaaaaaaaaaggaccaagtaggagctccctcactgtcacgtctaggacccagcattgtcacagatgattatgcagggtcttcattaagtgaaggcacacagcccagggtttcgaggagctggaagtcacaccagtctgctggccacactgtgccctcagaagaagtgtgtgcaatggaaactttcaggctagttatggctctgctgtcccacagcccccagtcttgcagaccttccttcaagcacaaccttaattcctagtccaggttcaagtcccaccttttatgttctccccctccattaaccccttctcttcctatttatttatttatttatttatttattttgagacagagtctcgctgtatcacccaggctggagtgcagtggcacaatctcggctcaccacaacctccccctcccgggttcaagccattcgtctgcctcagcctcccgagtagctgggataacaggcatgtgccaccacacccagctaattttttgtattttgagtagagacagggtttcaccatgttggccaggatggtctcaaactcctgacctcatgatccacctgcctcagcctcccaaagtgctgggattacaggcatgagccactgcacctggctctcttccactttagagtgagaagttgcttcaggaagtttgaaagcctgtttcatggcccactgagtctcttctgtgcaaaggggggtgccacaggcttttttcccccaagtgaaatggggcttccagtggatcgaagatctggtgtcctgtatgggggcctcaaggtcttggagcaagacagtctcaatgttgtatgggcttgggacctgcatctggccccaagcatctggaactgtgcacttaacctttcttcattacccagacttggatggccttgttggggttcaagggataggtcctctgtctcttcctttaaattattaactatttattacatccggaacctgtgagattcagcactcccaaccagaccctgggatgggtgagagaaaagcgggggtgtctctcccctccccactctgcccagctctcatcactgtcagacccaccagagctgagggcggagggattgggggctggggcagcctgggtccccatgcccctctctgtgcctcggtctccccccttccatggtgggcgggggggaagctccattcttaacctacctcgttttggggaggggtgggacgggggaccagagtgctgtacggtgctgtgggatctgcagatgaagcggtgggggctaaggaaaggtcccctggccgccacttcccagcagcgcctctcccaggtcccccagtcctgctccctgctgagacccacctctgatccatgattccccttcattgcccccaaatcaggggtacatggagggccgccctgggagccaggcagacctcagaccctggagcccccaggcccaatttcccagccgcttgcccctcagatcggatgcttggcccccagatttgggggaggcaccccaacatatatcttcctgatcttgtttctaagccagtctgtgacctcaatattgttagtgtcagtgcaggctgaagtggtgggggaggatgggggccaaagacccagccttgtcatcgggggagggggcacgagatctgctccaagaaatgtctgtgacaaagtctcagcctgtgttatttatttgcctctgtgcaccccacccactcaccttcctgaactgctaaaccagtctcctacttaaattctcccttctcccatcagaccctcaagctgagttttataagacactcaacaaatgcatttattgagcacctaattatgtgccaagccctgttgaaagcactggagataaagcagtgggcagaacagacaaaagtccctcctgcaaagagcttatgagctttatagtaggggagacaataagtaaatgacttaatatgttagaaatgatagaaagcagaaagaaaaaaaaaagtgggaatgggggatacatgccattttagctagagtggccaggttagaccctcctcaggagttggcatttgttgttttgagacagagtctgactcggtcacccaagctggagtgcagtggcatgatctctgctcactgcagcctctgcctcctgggttcaagtgattctcctgcctcaggctcctgagtagctgggactgcaggtgggtgccacaacgcccggctaatttttgtatttttagtggagtcagggtttcaccattttggccaggctggtctcgaattcctgacctcaagtgatccacctgccttggtctcccaagtgattccaggtggaaatctcccaagtgattacaggtgtgagccactgtgcctagccaggagctggcatttgaacaaagccctgacggaggtgagggagttctggggatgtctgcagggaagggtattttaagtaaagggaacagccagtgcaaggccctgagacaggagtgtgtccggtaagtctgaggagcttcagggagctagagtgttgagaggggaggaagcagagaagagagcgctaggagatgagggcagagaggcgatggggcagatctgtcaggccttgaagggcattgaatggacttaggtttttaccctgagtgagacggagccacaggaaatttcaaacatgggaggcatgtgacctgactcagttcacaggctccttctgctgcatgtggtcagcagagtaggagtggggtgggggacagcttcacagagaggaggctgctgtgatggttcaggacaagacagcagcggacaggcccagggtgagggccctgaagggtggagaagtgggcaggtgttgggcctactttgtaaatagaacccacagatttatgtatgggatttgagatagaggagtcaagatagtaagtccaggtttttggctggagcaatttttttttttgttttaaattgagttcatcacccaggctggagtgcagtggcatgatcactgctcattgcagcctcaaactcatgagcccaagtgatccccccacctcagcatcccgagtagctgggattacaggtgcacaccaccaagcctggctaattttaaaaatgtttttgtagagacatgttctcactatggtgcctggtctggtcttaaactcctgggctcaagcgatcctcccacctcagcctcctgaaaggcggggattacaggtgtgagccactgtggcccacctctgggcaatttttaacatttgatttatgtcaaaaaatagccccccaagtgtcctgccttggggtaaacagggttatggggttactcgtatctgcccttaaggaacaagttctacccctgttcttccctccaggctcctggtccacccccaacttccagcagaattgtctaggaactactggataccaggatacagtaaggaagagattagatctgacacaatgtttacttagcaacagcaacaaaacaacagcagtagtaacagtggaaataggttccgtggtttaagagtatagagtctggaatttcatcttcaagccttggcatcaccatgaattcactctgtgacttatcttctctcaaccttagttttctcttctgtaaaagagataagatacttcgcccaatagtacacattaaatgctgtatatatattagttattccttattaagtactccctatatatctgctaagcactttttacatatgaaactctaattaatcctcagcaacaactctaagaggtaggtactattatccccattatacagatgggaagcaatttggcaggaacatggagctggcgagtaacagaatcaagccctaaccctttgcctgattcctagggtgtaatctcttaaccactatggtgcattgcacctgctcactccaaggcctaagagggagaggagtgaaggcctaacaggcacatcgtgatcgatgaggagggcctggtgtgtgaggggtgtgctgggattcctgggtcccttatgtaattcaaaccctgaggtggaaaggagggaggaagttttggattttaggcagagttgggtgaacaccactccgtctgggctgctttaagagcagaggacagggccaggaacactggctcaagcctgtaatcccaagctttggaaggctgagagggaaggattgcttgaacactggagttagaggcaaacctgggcgacatagctagacccctctctacaaaactttatttcttttttgacacggagtcttgctctgtccccaggctggagtgcagtggcgcgatcttggctcactgcagtctgtgtctcccgggctcaagcaattctcctgcctcagcctcccaaatagtggtgactacaggcgtgtgccaccacgcccggctaatttttgtatttttattagagatgaggtttcaccatgtgcccaggctggtctcgaactcctgacctcaagtgatccacccacctcagcctcccaaagtgctgggattacatgcgtgagccaccgtgcccggcctctacaaaactttaaaaaaaaaaaaaaattggccggttgcagtggctcacgcctgtaattccagcactttgggaggccgaggcaggcggatcgcttgaacccagcagttggaaaccaggctgggcaacatgaggaaaccttgtctctacaaaaaaattaaaaacaaatcagccaggcgcggtggtctgcgcctgtggtcccagctactaggtgtaagccaccaaggctgactgatttttaaaaatttagctgggaggctgaggcgggaggatctcttgagcccagaaggtcgagactgcagtgagccgcgatggcgccactgcagtccagcctgaacgatagagcgaaatctgcctcaaaaacaaaccaacaaaacaccagcagaagacaactgagggaggaaaaggaaaatggcaccgaagttgtttttatgtcgccgcaacagtgacacccgccgccagcttgtcttgacagcggagatcccgaacgcactgcaatttacagctccagggggcgttcctacaaccccgacaggttagccgaggggcggggcgggcgggccccggggcgggttcggcgtcctcctgcgccaatgggagcacccaagcccctgcgcgggaagatgccgattggtcagtgccgccggacgctgcggggagctcgtgcgcgcggcgcttttggggcggagcctgccaccggccgccagggggcgcgccgagaccacactttcatggaggcggtgaaggcggaagcgtgggagggggccgcggtggcccaggacctgctggctctggggtaaaagggtgtgcggtgaggctggtgggtgcaggaaggccaggtctgccccctggacgcggacgaaaagggattcccagtgacatccccgccccctcccgctgcctcggtccccacaggtatggaggtgtcccgggggcggcgtcgcggggcgcctcatgcccagacttcagggggctgtgcgtgcggctggcggcggagctggcgacgctgggcgccctcgagcagcagcgagaggcgggcgcggaggtgctgagcgccggcgacggtaaacacggagcgggagggtggcaggggggccgccacggggccaccgagccctgacacccctgtcctcgcaggccctggcgcggaggaggactttctgcggcagctcggcagcctgctgcgggagctgcactgcccggatcgcgcgctctgcggcggggatggcgcggctgcgcttcgggaacccggtgccggactgcgcctgctgcgtgagtcccgggatgcagaagtggcaaggccatggcctccggagcggcgggctctgactttttaggggaaatcgaggttcccaaggggtgtggtcagaactttggggcggcccagagggtacgaggtgggtggggtgagcatgttggggcaagcagagcgctctaaaatgggcgggggtagaatttcgttttattttttatttattttattattattatttttgagatggagtttcactcttgttacccaagctggagtgcagtggcgtgatctcggctcactgcaacctccacctcccaggttcaagtgattctcttgcctcagcctcccgagtagctgggattacaggcgcgcgacaccacactcggctatttttagtagaaacggggtttcaccatgttagccaggcaggtctcgaactcctgaccccaggtgatctgtccacctcggcctcccaaagtgttgggattacaggcgtgagcccaccacgcccggcccggggttagaattttaattggagggcctaggagctcaagtgggttggattaggaggaaggcttgaggtttcaaagtgggcaggagtggaattcgtaggaggggacagggtctcaaggtggggcttactctggaaggctttaggtgggggggactagaaggtggaggattttgttttgttttgtttttaagtggaggtggggtctccctatgttgccctgtctggtcttcaactcctggcttcaagcgatcctcccacctcagcctcccaaggtgttgggattacaggctacaggcatgagccactgtgcctgggcaaaggtggaggttttaaagccggtggagcctcttttttttttgaaatggagtctcgccctgttgccaggctggagtacagtgacatgatctcagctcactgcaacctccaacttcctggttcaagcgattttcctgcttcagcctcccgagtagctgggattacaagcactcaccactatgtcctgctaatttttgtatttttagtagagacacagtttcaccatgttggccaggctggtctccatctcctgacctcgtgatccgcccgcctctgcctcccaaagtgctgggattacaggtgtgagccaccgcacccggccatcagtggagctttttgaccaagatggatgagtgggtagcagcctccctgagtgcacagcacccatttattactttcaggctttctctgctcagagctccaagccacccgcctcctgtgcctccgctctctgctggatccgagtcctaggccaccccttggtgaaggggtagtggagggagccggcatggtccaagaactggaccttaccctccaagccctggggctgcccagacctgcaccagggacccccgccagccagctgctgcaggagttgcatgctaaggtagagagtcagagtcccctcccgacctgggctaccccactttccttgtgggggtgggggtcctctctccacttctggaaggagtattccaaccactggcctgttttttctggagctgtgactggcattctcacatctgtggcctaggtcctcaggggtgtggggagctgagtttacagaggggcccatcctctctgccccagttggcctctgacttcttctcccatcagatctcagagctgcagccttctctgcccccagggtccctgcagcccctcctcagctgctcgctagatgcacccagatgggtaagactgtgtgcgactgactgaatgtgaactgtgtcctcatcagaggtggcagtgagagggacccctagcctgaccttgagaccttttctcccaggaagcgttggagtctctgtcccaaagcctcagagatcagtaccgctgccgccgctgcctcctcctcaagcgccttgacctcactacatctgctttccactggagtgaccgggcagaggtgtggtgggcaggggaccatgcagaattggagaggcccagttgtgggggctgcagttgcagggaggaggaatgagggccaggagtatcaccctcttgcaggttctcaggccatggacattttataattttttgaggtttggggctcctagaatctcagggtcccagggtattgttgaattcccagctctgagctggcagtatattcagaggcataccccatcattttttttttttttttgagacggggtctcactctgttgccaggctggagtgtggtggtgcgatctcagctcactgcaacctccgactcccgggttcaagtgattctcctgcctcagcctcctgagtagctgggattacgggcacatgccaccatgcccagctaatttttgtatttttagtagagacagggtttcaccatgttggctaggatggtctcgatctcctgaccttgtgatctgcctgtcttggcctcccaaagtgctaggattacaggcatgagccactgcacccagccttttttttttattttttattttttgagacggagttttgcttttgttggccacgctggagtgcaatggtgcgatcttggctcaccgcaacctccgcctcctgggttcaagtgattttcttgcctcagcctcccgagtagctgggatttcaggcatgcaccaccacgccgggctaattttgtattttttagtacagacagggtttctccatgttggttaggctggtctcaaactcccaacctcaggtgatctgcctgccttggccttccaaggttctgggattgcaggcatgagccaccacgcctggccaagtgtaccccatctttaagagatacgagcagagtcaggcacagtggctcatgcctgttatcccagcactttgggaggccaaggcaagaggatcacttgagctcagaagtttgagaccaccttgggcaacatagcaagacccccgtctctactaaaaattaaaaaaaaaaaaattagctgggcatggtggcgcatgcttgtccatctcagttactcaggaggctaaggtaggaggatcacttgagcccaggagattgaggctgcagtgagccaccatcacgccaccacactccaggctgggtgacagcgagaccctgtctcaaaaaataaatatttatttgagctgtgggcagtgaggtcttgaatggtaaagtaatgcttccaagatgacaggtcccacgtggggaagggctccagggtaccttctcttacctcctccccactccaggcccaaggagaggccatgagggcagtgctgatcccaattcgagaggttctgaccccagaatcggacatctccattgcacacgttctggctgcccgagccgacctgtcttgtctcgtcccagccaccagcgtggctgtccgcagagggacctgctgtgccatcaacaaggtgggcatctggggtagggaagggccctggcatccttggccttcagattggcctttcagcctctgctccagtccaagtttcagacttaccacctctaatccacccactagacatggcagctagaaggacctcgctcacacaaaaactgactgtggactccccagctcagaatgcttccgtggctccctaatgatctgaaaacaaagtctagctatttactgagtccctggctacttctccagcttgggcttaaaatccttccctatcaccaaacactacctatttgttgttttttaacctttttttttttcaagacagagtcttgctctgtcacccaggctgcaatgcagtggcttgatcttggctcactgcaacctccacctcccgggttcaagcgattctcctgcctcagcctaccgagtagctaggattacaggcacccaccaccatgtccggctaatttttgtatctttagtagtgacggggtttcaccatattggtcaggctggtcttgaactcctgaccttgtgatctacccgccgtggcctcctaaagtgctgggattacaggtgtgagaaaccgcacccttttaaccatttaaaaaaaaaaaacaaagacagaaataggccaggcacagtggctcacgcctgtaatcccagcactttgggaggccgaggcaggcggatcacgaggttaggagatcgagaccatcctggctaacacggtgaaaccccatctctactaaaaatacaaaaaaaaaattagccgggcgtggtggcagacacctgtagtcccagctactcaggaggctgaggcaggagaatggcgtgaacccaggaggcggagcttgcagtgagccaagatggcaccactgcactccagcctgggcgacagagcaagactctgtctcaaacaaacaaacaaacaaaaaacagaaataccctctgttttagtgattaggtatctagccgcatgcctctgtaagtagtcttatgtaaaatgagtattagggaataaagtctaacacagcaactattgaggcaaaatttaagttaagaaaaaaactgagcccgaggtgggtggatcacttgagcccaggagcagaggttgcagtgagccgggttctcgccactgagctccagcctgggcgacagagcctaggcgactctgtctcaaaaaaaaaaaaagaaaagaaaagtaggctgggtgcagtggctcacgcttgtaatcccagcactttgggaggccaaggtgggcggatcacaaggtcaagagatcgagaccatcctggctaacacggtgaaaccctgtctctactaaaaatataaaaaattagccaggcgtggtggcacgcacctgtagtcccagctacttgggaggctgaggcaggagaatctcttgaacccggtaggtggaggttgcagtgagctgagatcacaccactgcactccagcctgggcaacagagtgagactccgtctcaaaaaaaagaaaagaaaaaagaaagctcatgctagtatcttccaccagttcagtcccccctcccccagccactgtactcaaatagtcaacatctgctgtttcttcttcagcctcatgctgttcccttcgctctctggcccccttgtccaagatactttttttctctgcaactcaaatctcataaactctcaggtgcttatgggcaacgttccagaccgggggggccgcccaaatgagctggagcctcccatgcccacctggaggagccgaagagaggatggaggcccccagtgttggggtcgcaagaagaagaagaagaagtaaagggggactggtggtcgggggcggggggtcctccatgagatgctaatgctatcggtaatctctggggagtccgtttaaggctttccttggtatttggcacccaagccccccatctcctattcctgagtccccaaatgccctgctcccattcacgtcaataccaagaaccatgttctccagagaataaatttaatttatgacagctgtaggacctctctctgtgggggccaagtcaggggtgttggggtttgtgaaggggttgggggggtctctgctccctgggactgaatgggcccctgctgctcgaccctcaaagttctttgccctatagcacatctatcctgtgccgtgggcatgggtaaggagacattcaggcatcagacaagcatctgtcaggcgcctaccacctgccagccctgttctaggcactggggatgcagcagtgaatgacattgatagaaatccctgttctcctggagttgatgctcctgttgaggaaagacagacgttcaacgagataaagagggaaaaagtataggctgtcagagggagcacattctatgcagaaaaacaggagctgggcgtggtggctcacgcctgtattcccagcactttgggaggctgaggctggtggatcatgaggtcaggagtttgagaccatcttggccaacatggggaaaccccgtctctactaaaaatacaaaaattagccgggcatggtggcgcgtgcctgtaatcccagctacttgggaggctgaggcagaagaatcacttgaacccaggaggcggaagttgcagtgagctgagattgcatcattgcactccagcctgggtgacagagcaagactctgtctcaaaaaaaaaaagaaatggagatgtagggagttggtagaatgaggcctgagtctaaatgtatccaacacacagccgcacagatactaagtgcagggaaagggagcaggattagcatccaccaggatgcaaaagaggaaagtcacttccagggaaaaagatgacggacgtaccactaaaggcagtgtggatgggaaggcggatgcctctggaggcctacctctgggagccctgccagagtctgacggcaggactcaggactgactgggggaagggagtgaggaagagaggagaccaagagatgtctaggaatccagcttggaggatgcagttgatggtgggtccatcaccgggcaggggacctggaaggaggaagggaggaagaaagatgacagatgatgtggggagcatatgatgtctaggagacgcttcactgccaggaacacttccctgcccagactggtaagtggatgaatgaacgtcccctgtggaatcctttttgtaacccaatctgagagtctctgccctcaaatagtggcgtttactccattaacccgtacagtagctcctgatatatttggccttattcttgctatcttattggctagaatccttttttctgttctcctagtggttattgtccccaccctacccccaacatgttgaaacttctatttttcttttttttttttttttgagacagggtcttgctctgtcacctaggctggtgtgcagtggcacaatctcagctcactacagcctctgcctcccgggctcaagtgattctcctgcctcagcctcccgtgtagctgggactacaggcacccgccatcacacttggctaatttttgtatttttagtagagatagggttttatcacgttggccaggctgatctcgaacttctgacctcaagtgatcctcccacctcagcctccccgaagtcctgggattacaagcatgagccaccacacccagcctatttttctatcaatattaaaaagtaaccagtatccataccctcctaccccagcagtcaaggacttctgcatatttgtactttctatgggtctccaaatctgtccagtcttccccacgccaatggcctgtgtcccctgtatccacttgggggtaggggcggtttctcctcaccgtatctgtttcccaggaagggtgtggggattcagtctgggtccaggcatggcgaagctggcacccagtctcaggctccagggatagcgtgtaggagtgattttcctcggagcctgtttgtgggtggatggaagggatgtgggtctgatgggaaggacctcttcttgaccttggactcaacccctttcccccaggccccttcccagcaccggtgtgctctaggtcttaccacagctggcatggggagctggtgtggatgggacaggagctccggggggtcctgcatcgcccttggcccctggcctcttcttacattctaccttcacctggtctctgcagtgtttgtggcaacacagcccgcactctgggggaaggcagcggcaggggtccgatctgtgtcatccattcttccagcctgcgggccaaggcttccctcccactcactgacaccccactcaccccgacagcggtagccttgcttggtgacaccccagagctgggaagagaaaggagaaaaggttacccatcctaggagagggagggctgtggattggcagggcagctggggagtggaagtgtggaagctacccaggttttgaaattctcaaggctagagatttaactggaattaaaggaatgtgggtggggtacagtggctcatgccagtaatcccagcactttgagacgccaaggtgggaggttgggaggccaaggtgggaggatcgcttgagctcaggattggaggctgcaatgaaccatgatcgtaccacggcactccagcctgggtaatagagcaagacccatctcttaacaaaataaataaaggaaacttggagattatctcaagtttagataatcacctcagatattagatttaggtaaaatttagagttactaaaatgcaaattctatgggcaagagttgtctgctgtattcctgctgtaaccccagggcctaggattacctggcacacaggaggtgctcagtaaatatttcatgaatgaataaatgaatgtgggaagtaatccaaggtttgtgaattagtctcgggttataggttgagagattgatccactagccagagtttgaggatctcttgaatttggaagttattcagagtttgaatgatctggagtctagagatttggaggatgattctgtttgaacataatctacccggtttggagattatccaggtttgttgttgttgttgttgttgttgttgttgttgttgttgttgttgttgtttttgagacagaatctcgctctgtcacccaagctggagtgcagtgctgcgatcttggctcatgcaacctccacctcctgggttcaagcaattctcgtgcctcagcctcctgagtagctgggatcacaggtatgcaccaccacatgcagctaatttttgtatttttagtagagacggggtctctcttgctatgttccctaggctggtcttgaactcttgagctcaagcaatccgcccacctcagcctccccaagtgctgggattacaggcgtgagccaccactcctggcctcctatctagagttttaggtattatccatggttcagcaattgtctggggtggacattatctgggattttgggattatctggcatttggagattatccaggatatagggaatgtctggtgtttagggtttatatgaaacaggatgatttgaagctggaggatttctggaatttgggggttatctggggtttgcggactgccggcttcaggacagatggaacctaagggtggtgatggggtggggtgctcacgaagccactgcagctgtcgcagaaggtaggctttcggaaggtgacctcatggaaggtgtgcaggaaggccaggcccaacttggagcagatggcgctggcccggagcaggtaccctgtcagctcctctctgctgaaggatcctctcctgggggcagaaactgagcctcagcatgacctgccccaacgtcctccagacccaggagtccaggcaaccccagtgtcctcatcttcggaggatccaggagtcacaaccacttacccctggcgtgggggtgggtgaagcccatggcaggcgaagggaaaattgcccgagagtcgctcaaagtcctcctgagagattgttcctcggccttcagggtcataattcttgaacacagacttcagaggagtgtggggaagcagataaggcccagttgtcgaaatatgatccccatggccataagtccccacctccaggctcagggttctacagatgtcttccctcctggctgctggcggccgggccaccctcccctccttacctccaccagctgctccacatgccgacccagtgtgaccctgtccggcttgggtgtcacaccaggggcccactccaccaccagaggtgcattgaagggggagggtggctggggcggggacagaggagcacagttagtcactgcataggcttagggggggttcgaggtaattgggggagtccgaggccaggggttgggtctcaccaggctcttgggacaacgcggctcccgggcataagaaagctcatagatctcgtcttccgtgtagaagaggtccagggagagctggagcagacaggggtgttacggatcctcccatctatagccctgccccagacccccacacccactcgcaggctcttcccaaagcccctcctgggttcaaatcctggcattactgctgtgggacagtgggcaagggacctcacctctctgggcctcagtttcccaatctacagaatgggcacagtaagggtcccgacctcatagggttgtaaggtggaatgaggtacctggcacacagtcaatgatcaataactgttagtagccttttgcttagattcttggatatgtcaaagcttgagattttgggctatcagcatgagaagctcagaaccttggagtttaagaatgtgaaccccaaagcaattccagagctcagatcaatggatacttgagtcattggaggaagtggggaaaaaacatgttacttaaatagaatacagagctcactctgctccatatactgtcgttttttgagacagagtcttgctctgtcacccaggctggagtgtagtggtacgatcttggctcactgcaacctccgcctcccaggttcaagcgattctcatgcctcagcctcccaagtagctgggattacaggcgtgtgccactatgccaggctaattttttgtatttttagtagagatggggtttcaccatgttgcctaggctggtctcaaactcctcaggcaatccgcctacctcagcctcccaaagtgctaggattagaggcatgagccactgcgcccggctagacactgtcttaaagacattctttgaacgatgtcattggctgtctctcctcaaccaccctctgaagtgggtccttttattttattttatttttatttatttatttattttgagaaggagtttcgctcttcttgcccaggctggggtgcaatggcgcaatggcgcaatctcagctcactgcaacctccacctcccgggttcaagcaattctcctgcctcagcctcccaagtagctgggattacaggcacgcaccaccactcctggctaattttgtatttttagtagagacggggtttctccatgttggtcaggctggtctcgaactcctgacctcaggtgatctgcccacctcagcgtcccaaagtgttgggatcacaggcgtgagccactgcgcccggctgggtccttttattattcccattttgtggataaggaaactgaggcttaagggttcagtgacttgcccaagatcacgcagctagaaaaaaacctagaagttctggcttcaaaacccatgcactccagcacttttctatcctggtcctggagacactcacacacccaggaccctatatctcagtacccttggaagcccagcctgggcggggccaggggggctcaccgtgagcaggtgcagcagatcctcattggcgctgcagggtggatgctgcccttggagggccaccagctcctgcagccgcaggtagaggttgttcagcttgggtaggtgcaggcggccgtcaggcaacctgtcgggctgtgcctcatgcagggacaccaggtccttgaggtgcacgcccagtacaggcagccggaaacccgcgcagccagcccaggtgcggcggtagcgggcgtagttgttgtgggaggcaaggagctcagtgagctccaggagggcctggggaggagggacatgggattggggcgttatcaggacagtcccatcccctgagcagcctcctgtgtgggctctaggccttcagggacccagtggcattgtggaaacctctggagcccttccatatcccatgccggtctcagcatctcccccaaactgctcttcctcttgggtccccatctcagagaagttccacaatcccccattctttggctaaaatgatttcttttatctttctttctttttgatttttttttttttttttttgagatggagttttgctgtcttgcccaggctagagtgcagtggcgtgatctcggcttactgccacctccacctcctgggttcaagcgattctcctgcctcagcctcccaagaagctgggattacaggcattgagccaccacgccaggctaattttgtatttttagtagagacagggttttaccatgttggccaggctggtctcaaactcctcacctcaggtgatctgcctgcctcggcctcccaaagtgttgggattacaggcgttagccatcaagaccggcctttttatttatttattttttaggctagggtctcactctgtcacccaggctggagtacagtgtcatgatcacagctcattgcagccttaaactcctgagcttgatggctgggcacggtggctcacacctgtaatcccagcattttgagaggccgaggcaggcggatcatctgaggtcaggagttcgagaacagcctgggcaacatggtaaaaacctgtctctactaaaaatacaaaaattaactgggtctggtggtgcaggcctgtaatcccagctactcgggagtctgaggcaggcgaatcgcttgaacctgggaggtggaggcttcagtgagccaagatttcgacactgtactccagcctgggagatagagtgagactctgtctcaaaaaacaacaatgaaaaggctgagggggaggctccagcagtcctccccctcagcctcccaagtagctgggactacaggcatgggccaccatccctggctaatttatttttaaattttttttcagccaggcgcggaggctcacacctgtaatcccagcacttttggaggccaaggtgggtggatcgccttaggtcaggagtttgagaccagcctggccaacatggtaaaaccctgtctctactaaaaatacaaaattagcagggcatggtggtgcacccctgtaatcccagctattcgggaggctggggcaggagaattacctgaatccgggaggcagaggttgcagtgagccgagattgcaccactgcactccagcctgggcgacaagagcgagactctgtctcaaaaaaaaaaaaaaaaaaaaaaaaaaatttctggagatggggtctcgctatgttgcccaggctggtctgaaacacctgggctaaagtgatcctccaatcttggcctcccaaaacgctgggattacaagtgtgagccacactgtacccagcctataattatttcttaaaaacccagattttatcaagggtgtgtcatcactctcaaaacttccctagcttagcccatcttacaaggcgctataggatcttcccagggcatcttcggcttaatttcctgccactttctgacctcagccagtcctccccatggggactgcaaagttctctgctagcctgtctcccatctgtctccctcacagtccagctccggaccagacacactgaaagcagagagggatcagcaccatgagtggatggatgacagggaggaggaatgctggcagagcctgggggtctgggatttggaggagcaaggacttcatgtggtaccaggacccctgggcaggaatggacagggcttggggaattaggtgtgggggctcaagacagctgaccacttggagctttggggagggtagtgggattcaccttggtgctgtcagggctcaggtgggcatgggagtccttgagtctggagatggcactgtgacacaggccccctgtgactgccatcagcgtgttgaaattctgcagctggtggagcctctaggaagagaagcatgcacacagggccgtcacgggagggagggcaagtcaggagttcagatgacagcatcccagttgaggtggggtcccaggcatgtgtggaccaatgtggggatcagacaggtgagagaaggcgggtgtgtgcggcaagagtgggacatgccatgtgtgggcctcacaggggtgtcagatggctatctgagccgggagggtcaagcaagtgattgactgatacgaggttagaaaatctggggagacaggaagtacgagaagttgggcggatttggggaatagacaggtgtgtgtcaggtggaggaggcttcagacatgtcagggtgtcagccatctgggggtctgactgctctgagagtcacacaggtgcggggaggcaagaaggtgcaggctctgggcaggagctgggagccaggcagaggtgaatagggccagagagatatggaggagtcagacagatgctagacaggtgtggggccaccagggcagctggggaattcccttgccctccttttgacaaatttcggcagaggttgctgtggagagagtggggccagggaggaatggaaaatgctcagactaaggacaccccaggcggacgtcgagacccccaggtctcaggggccctgcaggagtaagcaagccagggaagacaccagaggaagggcgtggtctgcgtggaaatacgcaagggggcgcggccacagcggggccgtagggcttcccttttccccagaagggcgagaaggtgtccggaaaggagggggaagggaggggaagagaagggcgtaacacaatggggcggggcggggagagcccggacgcaatggggagcgatgcacaatcccgaagcgaccgctggggcctggggactggggattgaagcctcgggcttccatgccccacaaaggtgggggcatggaagagacactctcattgacctggggatagaatattcgggcatagggcttgggagcctgtcacgtctagggccaaggggtggggccacggtgggtgcgacgcggtgacatcaaggccaaagaagaagttacggtccttggttggaatgcccaggctgtggcctcgggggcggggccgggagatgcgtgacgtcaccgccgggatgaccctgtggggtcgagggtctggaaggggaaggaccaggtggctgcgtgcagtggagttcgcagccccaaggggcgggcctcacctgtgccacgtgaatgaacttgtccagcacctgtgcacgctgtaggggcccgggacggctcagcaccatcacctgcacccagcgggacacgctgttgctgagacctacggagccctccagggccgggcagcctcgtactgagccctgcaaaacgtagctccgcaggtcctggggctgggagcgaggtgggtgtcaaggtgggccgtggcgctcaggccctgcccttccatggcatccaactagcagtcacgatctctgatgtcctagcctggtctagccggagtgacctttgtcatctgtcccccaaccctcaggctgctacatgtccttaacgtcaccatgctcctctcccatctgaggaggcatgtttcaatatagccaggcactatatttgacaagtaatcatattaaataatttaatcctcataactctatgaggtgagtatcattccattttagaggtgagacagttgaggcacatagaggataggtaatttgcccagggtcacacaggtgtgagtcagggtgggcgtctatatgctcttaactgtacacctgactggtatacagtaagcaaagggaaggctggggaagatgaattgaaatcaacctctatctgttctgcccaaggagtgttcatttcatacccacatccactacactgagtatatttgcatacacactcacacacacaacacacacatacaatcgggacagtttcacatgaaggaaacagatccccaccttcccttgaaatgatgatgtccagatggcaaaagctaatgcatatatatgttgaagcacatgaaactgatccttgggtaggtaatatatgacaatttcaaatggttcaagcagatagcatttaccctggaccaggcactgttcctgcaaggcaggaactgtgcatatcccctttttacagatgaggaaactgaggcaccatgaatttaaatgcttgttgaataaatgataaaatattttgagcacttactaagtgccagtcgctgcaataagccttttatttatttattttacttttttgttgttgttgtttttcgagacagaatctcgctctgtcgcccaggctggagtgcagtggtgtgatctcagctcactgtaatctccgcctcctgaggttcaagtgattctcctgcctcaccctcccaagtagctgggattacaggcatgcaccaccacacctggataatttttgtatttttagtagagatggggtttcaccatgttggccaggctggtctcaaactcctgacctcaggcgatctgcctgccttggcctctttaactcattttcctggaccttctagcatacaggtttgagtttaagactttgagatctctgccgaatgaccatgcaggtgtcctctcagtcctaccttcccccagccaatccctcccctaccccagtgtctcccctgcttgggacggggatgggagggggtcctcaccgtgatagcctggaaggaccggaactccaggtaggtgaggtgctgagccagctcccccgtctccaagtggtcgaaaagcaaggacactttgcgctttttgcccaggcctgggctgctcattgggagtggggggccagggccaccagggctcaggctgggggccaagaggggcagggtattggagtggctcacagttgagggcttggggatatagagggagatggcagaatggcgatggggcagggaagaggggagcacagggctgactcacaggtcagaagagtctcccagtcttctctgggctgagttgccctcccgggccacggtggcccagaaacgacctatgacttcttctagctggggatcctggtgcatcacctcagggtgtcgcatcagccagtacctgagagtggtttggagatggtgagatgaggccgggggtggcgaaggtctctacaaggggtattttgggctgaggaatttctaggtgctgagctagggggtctctaaatgtgtgtgggggtccctggagggttggggtttggaggggcaccaggcttggagaatctctggagtaggatgggggtctcttaacagagactggggggatctgtgggaaacagaccggggagtcacttggaagtgggattattgggaagcaagatcgtggagcgtcctaggaactagactgggggcttccgggggtgaaatttttggagggacagaatgagggggtcttatgggctaggctggggtctgtgggaggtagagattttggggatcagagttggaggtctctgggcaccagctaggagggtctatgggatctggttggtgaggggggtctctaggaagtgggggttctaaggaacggaactaagagggtcttaggaaccaagctacaggtgtctcagaagtgggattttggcctgtggggctggttgggtctgtgggaactggcctggggattctctgaggaatgttttttgagggggaagcaggatggaagtcgtgggtcctgagagtggggatctcggcccagccctacctgaccaggtgacagatctgcagccgtctcagctcctgggtgtcccctgtggccttctggtatttgagttctggtcaaggctctgttttccaggatccatgacctgcctgctccccattcccattgcccaggttctcacgactctgccctctgccctccacccatagctcacagtcctggaggatatgaggtcagcaggcgggcagccaggtcggcggacggcagcacccagctgtgcatggccagcaccatgttgagcatgtggtcctcgtggcacaggctgccagctgaatctggggtggaaggaggggtactctgtgacagaatggccctcaagcaatgcagagcgtagctccagatcctgccggaccacctggttcaaagaccagctctaacggtgatccccagcatgaccttggacaggcaacctaacctcctgtgcctcagtttccttatctgtattgtgcatggggcagcatcacccctggcaagtcttgctgaagattgaaatagcaccagactggccgggcacagtggctcacacctgtaatcccagcactttgggaggctgaatcgggcggatcatatgaggccaggagttcgggacaagtctggccaacatggtgaaacaccgtttctactaaaaacacaaaaattagctgggcctggtggcatgtgcctgtaatcctagctactcgggaagctgaggcaggagaatctcttgaacccaggaggtgggggttgcagtgagctgagatcaggccactgcactccagcctgggtaacagagcgagactctgtctcaaaagaaaaagaaaagaaaagaaaaaagatttatataaatatatataatatacacatatattatatatatatataaatgtatatatttccatttcaggaaagaagaaatgcaggtgtttctgttatctctaatgtagtgattgagtttcattccacccagccctgttctcattttacctccaaaaactgaggtggagagaagcgagtgctgagcccgaggttagggccagggaggctgctggggagaggacacttaccgaaggactggatgcatttctccagcagctcatcttcgctgcagccgccctcactcagcaggcccaggttcatggaagccatgaccttgctgatttcccgagggctggggcatgtcttgtggcggcgcacttggcggggccggcctcgccctcctatttttccggtgcattcctggtgggacttcctgtgggcacagcccccaaggagtcatgggagcaccttctttcggacagaccctagaattccttttgactctaatgccccaaggcaccacgggagaggcttcctaaaggcaaagccccagggttacccctgacctaccagggactctagagagaatccccaggaatattccagatccctgggggaatcatgggagccctctcccacaagcaaactcccagggatattcctgctcccttcagggaatcagagaggaagatcctcaagaccaggggtccccagcccctgggacacagacaggtaccagtccgtggcctgttaggaaccagcgggcaagcaagcacccccgcctgagctccacctcctgtcagatcagctggggcattagactctcttaggagcatgaaccctattgtgaacttcacatgcgagggatctaggctgcgtgctgtttatgatgcctgatgatctaggctgcgtgctgtttatgatgcctgatgcctaatgcctgatgatctgtcactgtctctcatcacccccagatgggagcatccagttgcaggaaaacaagctcagggctcccactgattctccattatggtgagctgcgtaactatttcattatatattacaatgtaataataataaaaataaagcacaggatacatgtaattaacttgaatcatccccacaccatccccacccccttccacaaaactggtccctgatgccaaaaagcctggggaccgccgctcaggactgctctgaatctcccagggaatcacagtagaagacccctgggaccactcaagacccctcagggaatcataagaactccttccccaggcattgcccccaacttcctcttgactgcttccagggcatcctggaagagacttccttttggcagatcccaggattactcctggcctaccagggactcgggagaagacccctggaatctcttctgtcctccccaggcagaggcatgggaggacctgccttcaggaattgcctcctcagggctcccgtttggtctctaacaccctcccctccttcctcccacagccctcaagagagcaaggctcttggaccagtgtgatggctcacgcctgtaatcccaaagctttgggaggccaaggtgggtggatcacttgaggccaggagttcgagaccaccccggccaacatggtgaaacccccatcgctactaaaaatgcaaaaattggtcaggcgtgatggcgggcgcctgtaatcccagctactcaggaggctgaggcaggagggtcgcttgaacccaggaggtggaggctgcagtgagccggaactgcatcactgtgctccaacctgggtgacagagtgatttctgtttcaaaaataataataaaaaaattaaaaagagaggccagtcacagtggctcacgcctgtagtcccagcactttgggaggctgaggtgggtggatcacttgaggtcaggagttcgagaccagcctggccaacatggtgaaaccccatctctattaaaaatacaaaaattagccaggcgtggtggtgggctcctgtaatcccagctactcaggaggctgaggcagaagacttgcttgaacccaggaggcggaggttgcagtgagccgagatcgtgccactgcactccagcctgggcaacagagcgagtcttagtctcaaaataataataataataatagtaataatagtaataataattctccctctgcctggtgcctcccagaggctgctgttcctgataggggaagagggtaatggagagacaaggatggtgggagcagggaggctgctgaatccaagcttcagacgaaagtagaatccagaaatttttgccagctgttgtgacttcgtgttagtcacttaatttctctggggctcaatttcctcgaaggaaaaatgaggatagtccttggaccttctccagggatttcttttttctttctttctttctttttttggagacagggtctcactctgtcacccaggctggagtgcagtggtgcgatctcagctcactgcaacctccacctcccgggttcaagcaattctcctgcctcagcctcccaagtagttgggactacaggcacgtgccaccacgccgagctaatttttgtatttttagtagaaatggggtttcaccatgttggccaggctggtttcaaactcctgggcccaactgatcctcccacctttgcctctgaaagtgctgggattacaggtgtgagccatcacgccaggctcccacctctaccctttttcagacagggtcttgctctgtctcccaggctggagcacagttgtgcaatcaaagctcattgtaaccttgaactcctggactcgagtgatcctcctgccttagtctcccaggtagctgggactacaggtgtgcacgaccatacccagctaattttgtgtgtgtgtttgggtgtgtgtcaatgggggggggggtctcactatatttctcaggctggtctagaactcctggcttcaagttctccttgtcttatcctcccaaagtgctgggattagaggcatgagccatcgttactagaagggacattttaaagtattatatatgtcctaggctaaggaaggagcattctaactaagtcagcatttccctaagtgtgggcacccagctagtaccaaaagcatcacctgggaactggatatcaatacagattctcaggtcccaacccagacctacaaaatcaaacactttaaggctaagggtggtggctcatgcctctaatcccagcactttgggaggccgaggtgggtggatcacgaggtcaagagatcgagaccatcctgcccaacatggtgaaaccccatctctactaaaaatacaaaaaagtagctgggtgtggtggtgcacacctgtagtcccagctacttgggaggctgaggcaggatgatcgcttgaacccgggaggcagaggttgcagtgagccaagattgtgccactgcactccagcctggcggcagagcgagactccgtctcaaaaaaaaaaaacaaaaaaaaaaaaaccaaacactttaaaggtaagcccagcaacctgtattttacaagccctccagacagttctgaggctcgctccagtttgagaaccactggtctagagtgtctcattgagtacttacaggcctctccgaggtagaggatatgattgttctactgacagaagaaaaacccgagacacagagcagttaagtgacttacctaaggtcacacagctaggaaattaggcagccaggagtctaccactaaactgctgggtggggaggaaagccctttgcccatcagagtggtgctgggggtggcaggaggagttacccaggctagggagccacccaccatctgcctctgtggggacagaagggccagcttgcccaggagatgaagcccattccagaaccggccgcacagccagccactaggccctgtcctgcagccccctgtaggggtctggaacagccaggagtggtttaagaggcaggggagtcgccttgccctgtgccacactcccctctcctgggccaggccctgcaggagcctggagtttccagtccacggggatggggaaccaggaagcccccagggagggcagagacactcagcccaggccagggatggaggtggggtgatgaggagtggaaaaggggcacggagcagctcaaactccagggacaacacggtacagatgccacatacaagcgactgcagccgtagctggctccagactccctgaagcatccacctggcccccctgcgcctgatcccaaagaagtcaggaatcctgccaccctggcgagtgatctccccagccctcccatgcagagggaggcctcagggtgctgccgggctccctggggagggtcctctcacctcttactgtcttttctgttcatgcttcccgcgtggggtgaggaggccgggggtcttgcaagagtagggctcagctcctccccttgcccaggactccagcttctcagcccctagggagctggggcctcctcggtgcttgggaaggaaagaggaactgcccctccccacccaccctcaggccagggggaaggaagaggctggggagagaccgaaggcccccctcccccacacggggatcccttctgctgaggtttccggcatcgctggctctcccaccctcaagctccccggcgggctctctatctcccccatctttcggtgtcgagacccgtcactgtcatacttcaataaaagaaggggcttttctttttaaagcatgactgatatttatgtaaaaacacacacactcactcaaaaagataagtctgtctgtctagaaggacatattcatatatataattcatgaaggtttgaatggaaactcacaagacatagtattttgtatatttcttcataggcgtctcttattcctagtttaagtgataccatttgtaccctggaaaacattttcactttctgactttattgtaacaaacctccacatagcacctactgtgtaccacacactgctgtaaggactttaaaaatattaactcatttaatcctcacacaatccactgttaccttaaaaaaaattacataccggaccaggcacgggggctcacaggggctcacgcctgtcatccagcactttgggaggccaaggcaggcggatcgcttgagtctaagagtttgagaccagcttgaacaacgtgacaaaaccccgtctctacaaaaaatgtaaaacgttaggccggtgtggtggctcactcctgcaatcccagcactttgggaggccgaggtgggcggatcacctgaggttgggagtttaagaccagcctgagcaacatggagaaaccccgtctctactaaaaatacaaaattagccaggcgttgtggcacatgcctgtaatcccagctactcggcaggctgaggcaggagaattgcttgaacccaggaggcggaggttgccgtgagccgagatcgcgccattgcactccagcctgggcaacaggagcgaaactctgtctcaaaaaaaaaaagttagctgagcgtagtgatgcacacttgtagtcccagctactcaggaggctgaggctagaagattgcttgagcccaaggaggtcgaggctgcagtgaaccatgatggtgccactgcacttcagtctgcgtggcagagccagaccctgtctcaaaaaacaaaaaacaaaaaaaaaaaacacacacacacatcaaaaaacattagagatggaggtaaagccttggggaagcccctccccatcccctgcctttcttaagcagggtgtgaccaatatgacacgttgtcgagtttcgtccaaactgctgtctgtgcgtttaagcacatcatataaacatgtgctcctagaaacagacttttcttttgagtgtgcatttttttctttttacctaaatgtgtcatgctcgacacttttttttaaattgaagtacaaaaaagatcacgaatcattaagtatttaggttgatgaaatgtcaccaactgagcaaacctgtgtgacattcatacaaatccagacacagaacattctcaccctccacaagccccctgtctttcttcccagcacgaattcccacagatccccactcgcccgaagtctggcgcagtagttttgtcttgttttgagctggataaaaatggactcctgtattgaatctgggttctttctctccacgtcttgtctttgcagttcttccatgttatcatatttggttataatttattcctttttttggccgggcgcggtggctcacgcctgtaatcccagcactttgggaggctgagatgggcagatcacttgaggtcaggagttcgagacccgtctggccaacatggtgaaactcccatctctactacaaatacaaaaatgagccaggtgtggtggtgcgtgcctgtaatcccagctacttgggaggctgaggcaggagaatcgcttgaacccgggaggaggaggttgtagcgagccgagattgcaccactgcacttcagcttgggcgacagagcgagactctgtctcaaaataataataataataataataataataattccatatagtctttcattatgtgacaattccatgacttatatatatatatttatttatttagagataggtgttgtggatagtgactaagcgggctggtggcatgctaacttctattttttttttttatttttgagacagagtcctgctctgtcgcccagtctggagtgcagtggcgtgatctcagctcactgcaacctctgcgattgaagcgattctcctgcctcagcctccccagtatctgggatcacaggtgtgtgccaccacacccagctaatttttgtagagacggggttttgccatattggccaggctggtcttgaactcctggtctcaaataatccacccgcctcagcctcccaaagtgctggggttacaggcgtgagtcacagcactaagttctatttttcatcagtctagagtctggtaataactagacactaaaacattttaagttaagtgagttatctatacaagaggactatatgtcctagactgtaaaaaaaagacaaacttatagcttctctgttttttttttttatttttatttggtcctaccaacctgactcttttttcttaattaagactccacagcagggtctccctctgtcaccaaggttggagtgcagtggcgagatcctagctcactgcggcctcggactcctgggcttaagccatcttcccacctcagcctcctgagtggctaggactacaagtgcacaccactgtgctctgctaattttttttttattattttcctgtagaaacagggtcttactttgttgcctaggctgatctcgaactcctaggctcaagcaatcgtccttcctatgcctccaaattgctgactctccaggcgtgaaccactgtccccggcctccgtgatttattgatcaattttcctgtgatggacatctgagttgtttccaggttggggctgctgtgactatttgagcatctgacttttgatgaacatagagtgtaccatattgtagggcagtacccaggagtggaataaatgggtcatagtagttactgtgattctaccaaacatagcatgttagcaattcattgaaatcgttctctcagaagtatatttttccactttttttttcactaaaagaaagaaccgtggatgtatattttttccaatgcagaacatttagacagtcactgaactcgccgtctttagtttttccatcacgcgatgttaccatagcttcagactctctcttcctgcccgttttcaccctctctccccctggcctcatggtgttctgtctgactctctcagaccatctcctgtagcacctgcatcttgaatgtgacttaacaatcctggctgagcagagacttcgtagtgtggcagtgtctccaggccctggggacccagaaaagcctcaaggaggaggtcagaaatcctggcacttgtttctactgtacacaggcagccttagtcctcgggctggccaagaatacccacaatacccgtgctgatgactacaaaggaagggacttctgaatcaaaccacagaaactcctaaggcagaaaaatgatggacatgataacatgcaaatacagactttcttcttttgttgctgttcttctttctttctcttttaaattttaaagatggggtcttgctatgttgcccaggctggtctcaaactcctgggctcaagggatcctttcacctagacctcccaaagtgctgagattacaggcagattttcttttaacgaagacaccatgggacaaatgtcagatgacagaaggggaaaaggtgtttgcaatatttaaaaatcaatgagatattaatatctagaatataggtcaggtgcagtagctcatgcctctaatcccagcactttgagaggctgaggcgggcagatcacttgagatcaggagttcgaggccaacctggccaacgtggcaaaaccccgtctctattaaaaatacaaaaattagcagggtgtggtagtgggtattgctctgtcatcccggctacttgggaggctgaggcatgagaatcagttgaacccaggaggtggaggttgcagtgagctgggattgagccactgcactccagcctgggagacagaatgggactccatctaaaaaaaaaaaaaaaaaaaaagaatataaaaggaacagctgcaaatcagcaagcgaaaaagacagcaaccataatagaaaaatggccgggctcagtggctcctgcgcctataatgtaagattacatgcttgtaatctcagcactttgggagaccgaggtgggtagactacctgaggtcaagagttcaagaccaccctggccaacatggcgaaaccccgtctctactcaaaatacaaaaattaggctgggcacagtggctcacgcctgcaatcctagcactttgggaggccaaggcaggcggattggctgagctcaggagttcgagaccagcctgggcaacacagtgaaacccgatctctactaaaatacaaaagaaattagccaggtgtggcagtatgcgcctgtagtcctgggggtgctgaggcaggagaattgcttgaacccaggaggcggaggttgcagtgagccgagatggtgccactgaactccagcctgggcgacagagcaagactctgtctcaaaaaaaaaaaacaaaaaaaagtgagcagggatcacaatgagcagataacaaagaaacccaaaactctgataggcacttgagaagatgctagaaattgttggtaactcatcagggaagtggaaattaaaatgacagcgagtccaggcgcggtggctcttgcctgtaatcctaacactttgggaagctgaggtaggaggatcacttgagaccagcagttcaataccagcctgggcaatatagtaagaccccacctctataaaaaatttaaaagttagttgggcgtggtggcacaagcctgttgtcccagctgctcgggaggttgaggtgggaggatcccttgagcccaggagttccgggcagcagtgaaccataattgcgccactgcaccccagcctgggcaacaaagtgagatctcatctctaaaaataaaatagagaaaataaattaaaaaacagtgagtcaccctatataaatctggcaaaaattagttaagttggaaatgccacatgagggttggggatatggggacccggggaccctcatgcactggtagtgagtagccattccgagggctacccagcactacttacacaaatggtgcgcatggatatgtcacccagcaattagcttctgggtacgcacaataaaacattctccctcagcttcctgggggaccaatacacagatgttccctccagcattatttcgggagagctggaggcagcctgggtgtccgctcccagtaggggtaggtggaaaaacagaagggatcagtcaccagagaatcctgcaaagccaccactgtcacacaccaggtgtccacagagcaacaagggtaggtcttaaaacacataatgatgactgacaaaaataagaaacactattaatatcttatgatataatgctcaatgacacagaatcattttacatttacataaagttttagggaaaaacaatatttaatatacaactatgcgttggataatgtataacagatacaacatagaattgtattgtactgtataattatattagcctaaatatataattatataattatacattatataatgccaaattatataattccataatatgacacaaacttttgtgctatttattgcagttgtgttaacatcagtatttaattatggaacacctagaaacctgctataccttgaagaacggtttctatgtaattttgtttaactatgggatattgttttatataacttactgtataccactacatgttaataaaaaaaatttttttttttttttttgaggtggagccttgctctgtcacctgggctggagtgtagtggtacaatctcggctcactacaacctctgcctcctgggcttaaatgattcttgttcctcagcctcccaagtagctgggattagagtcgtgtgacaccatgcccagctaatttctgtgtttttagtagagtcagagtttcaccatgttgaccaagctggtctcaaattcctggcttcaagtgatctgtctgccttggcctcccaacgtgctgggattacaggcatgagccactgtgtctggcctagtaataattttaatagggctggacgtggtggtttacacctgtaatcccagcactttgggaggctgaggtgggcgaatcatgaggtcaggagttcgagaccagcctggccaacatggtgaaaccccgtctctaccaaaaatacaaaaattagccgggtgtgttggcaggtgcctgtaatcccagctactcaggaggctgaggaggagaatcgtttgaacctgggaggtggaggttgcagtgagtcaagatcttgccactgcactccagtctgggcaacaagagcaagagtccgtctcaaaataaataaataaataaataaataataataatagcaacacttacattacattaaccaggcactggcactgttttaagttttatctcatttaattaattatctcatttaactctcccaacaaccacgtgaggtcggtactattaatattccccttactggatggggaaaccgaggcacagagaagctaagtggcttatccatgtaactcaaggaagtggcaaggctgggtgggattcagatccagattatctggcttggagtcggagtccttgttcttttttttttttttttcagacgaagtctcgcccaggctggagtgcagtggctcaatctcggctcactgcagcttctgcctcccgaattcaaggagttcaagcaattctcctgcctcagtttcccaagtggctgggattacaagcatgtgtcaccacgcctggctaatttttgtacttttagtagagacgggggtttcaccatgttggccaggctggcctcgaactcctgacctcaagtgatccacccacctcggcgtcccaaagtgctgagattacaggggtgagccaccactcccggccggagtccttgttcttaatcactatgtttggtgctttttaaagtcaggagatctggtgcacatccctgctctgctgcgtgatatcttgcaagaacttccccactcagagcctcagtctgccctctgtgaaatgggagaatgatggcacgttacttaccgtggtggggagaaagcgcaggtacctcctagatactctctctcccaccccacctccggcggccaacggccaagcaaacctccagccaagatttggggtatgtgggcagggctccggcgaaggggagtggccggggagtcctggtccaatggggcccgggggcggggacttcctcccatctctgtccagcatgcgtgtactcctcgcagttccatctacctcgcgggtgcctctggtgtctccagaggtctccgaccccagcccgcccccagccctcccgcccagcccgcagccccctccctctgttccccgacctcagaccctgggcttccgacctcgacatcatgggtgacgcagaaggcgaagacgaggtccagttcctgcggacggtgcgtatctctgggttaggggcctgtggggctatctcttggggctctctgagggtctctctgtctctgaatgtccctgtccggcttgctggtggtctctgagactcgaggtctcttcctatgtcactttgagtgactgtcactctgtcttttagtctccttcacctttctcactacagagaattagtaggattggggactccagaatgggaaagggatcttcggttgccctctcttctgactttagcgatttgtcccccacaagaaggacccccgagggagcacaccctcacaccatcttggaagcaggcacttggggaaggtggttctaattcctgggcttgatttagccatccccccacccccaccttagccctaattctctttttgctccagactctgacctatttaaattcttgagaagggagctggagtgagctggaggacacagctgcttccaactcctagcccttgagggtcttgtgggggagggatctcttgggttctgggtctttctttccttcttcgttttgggcaggagggctgctcccaatggctgctaatggtcttgcagggtctctgggtggtgtctctccccatctgtctctttgggtgtctccatgtctctgtctcttcctccatctcagtctccctgtctctgtttcttagcttaaggccctctgattttcgctgtctctctagctgggttactccctgcatctgagccccagctgggggcagggatgggaattggaacaacaggtgtccctcccagaatagccggcttttctggggcctgggcaggggatggggaggggatgagagggaggaggggctgccatctccttgtccttcccatcttcccctcccagtggctccgcagggtgtggggtcgtaaatatgggaggggacgtcctctcctctgggctaggtctgctgaccagacgctagccccgcccctccccccggggccctggagccacacaggaaatgctgacacagcattcctgccccagaataggaccctggcgagccgggtccggtttcctgggagagaggaacaaacagctggggctggtagtgaaggatggggacagctgggaaggggcctagcttcagccgagactctctccccagccccagcccctcagcagacaccatgggtcgggccctccccagccctaataagaccatggccatggccactggctcttgagctgtcgctctaaaccaggccctgtgccctgggcctctgcctcctgagacatctaattatatccttgctgccctgtcttctgaggtagggtcctatctttatctccctgacagatttgagggaaaccaaggcccgaatggtagaatcactcacccaaggtcaaggccaggaagtggcatctctggatgcccctggtgcccagccccattgccttcaccagagaaaatctgggcccagacttgccaaagtagtcagcgttagggttctggaggcttggccctggaatctctccaccccagactgggtcagtttttctgattgttactgaggtcgtggtggatttctcaaaactttctggaggctgggctcagtggctcatgcctgtaatctcagcactttgggaggccaaggtgagcggatcacttgaggtcaggagtttgagaccagcctggccaacatggtgaaaccccgtctctactaaaaatacaaaaaaatattagccaggcgtggtggtgcatgcctgtaatcttagctactcgggaggctgaagtgggaggattgcttgaacctgggaggcagaggttgcagtgagccgagattgcgccactgcacactccagcctgggcgacagggcgagactccatctcagaacaaaaaaccttctggaccacatcccgcccataagaaacattctgtcttacaactcagtacatgcacacatgcatagacatgactaaaaaccaactttattgaggtataattgacctgcaataaattttacccagtttatgtgttcaatgagttgttttgtttttgtttatttatttatttttttgagatggagtttcactcttgttgcccagactggagtgcaatggcgtgatcgcagctcactgcaacctctgcctcctgggttcaagcgattcttctgcctcagcctcctgagtagctgggattacaggcgcgtgccaccaagccgagctaattttttgtatttttagtagagatggggtttcaccatgttggccaggctggtcttgaactcctgacctcagatgatccacccatcttggcctcccaaggtgctgggattacaggtgtgagccaccacgcccggcctttttttttctttttgagacagagtctcaatctgttgcccaggctggagtacagcagtttggtggttggttcaacgcaacctccacttcccaggctccagtgatcctcccacctcagcctcctgagtagctgggactacacgtgcatagcaccatgcttggctaatttgtaaaattttttgtagaggtgaggtctcactatattgcccaggctggtgtcaaactcctgggctcaagaaatcctccggccttggcctcccaaagttttgggattacaggcataagccaccatgcccggcctttcttctttcactcagcataatatttttgacattcatccatgtagcatgtattgagtttgttgctttttgttgccgaatattattccattgtgcgactatactgtggtgtgtttatcagttcacctgctgatggacatttgagtcgtctccaatttttactattatagacaacacagggcctgtgaccattcacttgtacctatttttaactgaaacaagtctcataaaatgtagatggcccctgaagcatgatgggcacgctgtgattttctattcttgctccattttgcttcgtttggttaagtatgatggccacagcccccccaaactgatttcacttccctttggtgggtggtgacctctacccttacccaggctggggtttctcaaaccctggcccaagttagaagctcctggggtctggtaaacagtacgtattccctgctgaccccaaatcaggctcttgatggtggtaggggactgggccagcagggaagctatatttttaaccagaaccctccgcttccttcattttttttttctttttcttttttttttaagatggagtcttcctttgtagcccaggctggagtgcaatggcacaatctcggctcactgcaacctccgcctcctgggttcaagcgattctcctgtctcagcctcccgagtagctgggattacaggcatgcaccactacgcccggctaatttttgtacttttaatagagatggggtttcaccatgttggccaggctggtctcgaactcctgacctcaagtgatgcgcccaccttggcctcccaaagtgctgggattacaggaatgagccacctcgcccagcctgccttcattctaattcaggaaaagtttgagaatcaatgtggtaatgattgggctctctgtcgctgctttgcactctggctttgccatttgcctgcttcctaatttggggcaagtgatttttatttttctctctgagcctcagtgttctcatctggaaaatggggacaagattatatacaatagccagaccccatggctcacacctgtaatcccttcgctttgggaggctgaagcaggacgattgcttgaggccgggagttcaaaaacagcctgggcaacatagggagaccttgtctttacaaaaaatgttaaactttagctgggcgtggcagtgtgcacctgtagtaccagctacttgggaggctgaggtgggaagatcacttgaaaccaggagtcggaagctgcagtgagctgtgatctcgccactgcactccagtctgggcaacagagcaagaccctgtgtctacaaaaatatatatatcttaaattagctgggtgtggtggcatgagcctgcagtcatagcttctcaggaggctgaatggagaggatcactcagcctaggagtccaaggctgcagtgagctatgatcgtaccactgcactccaccccaggagacagagtgagacccagtctcttaaaaaaaaaaaaaaagttatttttcaaggggcccatgcaagtatctctctgacctcatctcctccctgtttgcccctcctccttgcggccaccatcctgctccatctcctgtgctgtccctcaacaccccagcacccagactccctcctcttaccccagagatgagcaggcctgattccttcttgttatttggacaaggctcaactcaaatgtcacctccttggagaggctgtcacttcactccctcactgatctcatccccatcctaaaagccactctcttacatcagcctgggttattttttctataacacctatcactgacattaacattacatattaattcacctgtttattccctgtctccaccatgaggatttaagctccctgagggccgtgattttttttttttccttttgagacatggtctcaatctgtctcaggggccccagggaggtggggcttgattatgactcactgcagcctcgatttcccaggcttggcagtcctcccacctcagcctcccgagtagcagggactacaggaacataccaccatgctcggctaatttttaatttttaacttttgtagagatgggggtctcattatgtatattgcccaggctagtcttttttttttttttttttttgagatggagtctcgctctgtcacccaggctcgagttcagtggtgcgatctcggctcactacaagctccgcctcccaggttcacaccattctcctgcctcagcctcccgagtagctgggactacaggcgcccgccaccacacccggctaattttttgtatttttagtagagacggggtttcaccatgttagccaggatggtctcgatcctctgaccttgtgaccctcccaccttgtcctccgaaagtgctgggattacaggcgtgagccgccgtgcctggccccaggctggtcttaaactcctgggctcaagtaatccttctgcctcagcctcccaaactgttgagatttgcaggtgtgaaccaccgcgtccagccaaggcagggatcttgatcttcattgactttattcactgctctatatttagtgcctagaacagcacctggcccatggcagatgctcaaccaaagtctgttaaatgagtgtaaggcccagagcataaggcctgggagccagtaaagtgcctaataaaaacagcctataccattactatttttttttttgtttgttttttgagatggagttttccccaggctggagtttcactcttgttgccccagactggagtgcaatctggtggtagcaacctccacctcccaggctcaagccattctcctgcctcagcctcccaagtagctgggataacaggcatacgccaccatgcccgggtaattttgtatttttagtagagacagggtttctccatgttgttcaggctggtctcgaacttctgacctcaggtgatccacctgcctcggcctcccaaagtgctgggattacaggcgtgagccaccgcacccggctatttttggttttgtttgtttgtttttgagatggagtctcactctgtcacccaggctggagtgcaatggctcgatctcagctccctgcaacctctgcctcctgggttcaggcgattctcctggctcagactcccgagtagctggaactacaggcgtgcaccaccacaccccgctaatttttgtattttttagtagagatggggtttcaccatgttggccaggctggtctcgaactcctgacctcaagtgatccacctcctcggcctcccagagtgctgggattataggtgggaactactgcgcccggactcaatactgtcctttatggtacttccaggatccagcccgggctgtcacattgcattcaggtgccattagaaagcagtctataaataaagataaaatagcagtctattattaaaacaacacgcaaaagagagaatttagagaaagatgagcttaaaaagcaatttaacttgagcaagtttccaccttccagtggatcactttgcagaccccacttgggaggcctctggagccagttggactgaggttcaaatcccagctcctcctgttaccaactgtgtggccttggtccatctgtgtcccactttgagcttcagtttccccattttaaaatggggataagccaggcacaacagttcatgcctgtagtcccagctactcaggaggctgaggcaacaggattgcttgagtccaggaggtcaaggttgcagtgagctataatttacaccacttcactccagcctgggtgacacagcaagaccctgtctctaaaaataaaaataaatgggatgattacttgaggtcaggagttcgagagcagcctggccaacatggcgaaaccttgtctctactaaaaatataaaaattagccaggtgtggtggtgcacgcttgtaatttcagctatttgggaggctgaggcaggagaatcgcttgaacccaggaggtggaggctgcagtgggctgagattgcaccactgtgctccagcctgggcaacagagactatttcaaataaataaataataaaaaataaaataaatgggatgatgctggcttgtatctcaaggagttgtcaggagcaggtagagggcttgggtgggttgatcttgtcagtcactgtctttttcataaggaccagggtgggaggaggggcctgtggtctgcagtatttgtggtatccgggccaggcccccctggagacgctgcccctcggttccgcaggacgatgaggtggtcctgcagtgcagcgctaccgtgctcaaggagcagctcaagctctgcctggccgccgagggcttcggcaaccgcctgtgcttcctggagcccactagcaacgcgcaggtctgtgcaggagggagaggggcctggggacaggggcgtctgaaggggcagagaatcttgggtccaaagaagagggttctgggagtctgaaaggaggtgctgacaggagagaaagtgaggaggggggctaaggctaagaggggctacctgaggtggggaggggtggaggtctgagaagggaggggcagggggtctggggtgttggagggaatccctgtgtgcacagaagtgtggtaggccagggcgggggctgctgatccagaacgttccttggcaggtggctgagtgggcagaaagcctcgggtttaaggggaggtagcctgagagtccagaagaagggctggttggggaacgggtctcaggagggaggagcagggaaactgagggacggctggggcgtggggagggggggtagggagggacgaggcaaaggacctggagcacaaggaggaggggttttattttttatttttaaaagtttttcaggtaacaagactgaattattatggggtgttttagggggaaggaggccctcggcgggggcgggggaggatgggacagggcctgagatgcggagggcatctgatgggggtgggggcttgagggtcttaggtagtggagtctgagggaaggtgatccccaagtccgagctcgggaattctgagggtgggggcagctggagtctgagagggcaggggatcgaggggccgagggccttggatccaaggcaaaggggcctggagggtcaggggacacccgcaggggcctgacttgggagactgggggctgagaggtggaaggagcctggggtctgaaaggaggagacctggaggaggggcaggggctggcagaccaggggatgtggaatctgatgggggggaagtttcagagtctgagcgagtggggtctgaggagcagagtcttgagtttaggagttggacggtgggagactgaggagggagtataaggttgagcgccctcctgtgtctgtgaagcagaggtcagaggtgtttgaaggaaaaggcaggagcgaggactgtgtgatggtggaggcaggaggtggggcttcctttggggttggagggatgtggggtcatctgcagaggaggacacagaacaggagattcctgtccttggagcagggtcagtgtgtctcaggggagaggcatgggggtgaggcttcctatgagattaggtggaacacgggttagtggggagggttagggttagggaagtttctatggagtctgggtgggtctgaggtgtttgagggaggaggcacagaagaggtgttttcgtgatgttggtctagattcagtgtgtctgagggggatggcagagggcagggccttcctgtggggtgggggtggggtctggcgtctcaagagtgtgggcatccagactaggggagggagtgtggcagggaatgttgctggggtgggggggtcttctgacccctcacttacatccccctcccaccccagaatgtgccccccgatctggccatctgttgcttcgtcctggagcagtccctgtctgtgcgagccctgcaggagatgctggctaacacggtggaggctggcgtggaggtgaggaccccacctgggggtgggcggggtggcagagatgggcgagaggacccaggggtcgtttagggcacggtggcaaggatgggtgagaggacccgggggtcgcttaccatctgctcttcttcctctctctgccctgccccccacaggccctcaatttggataagtgggtaggtccggccttggatgtcacctgtccttccacccctcctgaccccaggcaggcccgtctctcaggcccacgccctgcacacaggggctggagggtcctcccccaccccagttgtcaggggctgtggagcccagaacaggccaggcaggaaggaaggaaggggatgggggcttctgagcccctgtccccgacgcctgctcctttctcctctttccagtcctttcccccaaccctgatcccagctcctctccgcatgggacctctcccacctcccccatcccaagcgtgagtccctctggtccaggagtgggtccaccatgtgatcacctggccccatcacatggtacccccatggcgcccttggagcatgggcatgtgacagccatgatgggaggcatggtgacatcgagcagtcagatgtctgccccaaggtccgggttggggaccttgtgctggggaggggcggctgtcttagactgcgggtgacattcacctatggaacaactgctaggcctgtcccagagcacacgggctgcagcgcagcatgatgggggaggtcagagcagaggggccagagtacacggaacacgagatcttgggggtgtcctcagggtccccaggaaactagaagacgggttcattctcctgagtgatttccagccaaggtgaaggcagcagagaggacagagtgggctttggggaatataaaatgctccatccataggcatctcagagatatagtccctgcttccgtgaatggggaaactgaggcagagagtcctgcaggagtctgagctgaggctgttttacctctaggcctgagcatggtattttacagggagcatcttgtcacctgtgactaggccagacctcttggggatctggagagtccggggatctgtgcttattctgttccctccctccccctgcagtcatcccagggcgggggacacaggacgctcctgtatggccatgccatcctgctccggcatgcacacagccgcatggtgagtgcaacctcggtgggcgtgggcaggggccagggcatgtggggcctgctagaaggaggctgacctccctctacaaccctagtatctgagctgcctcaccacctcccgctccatgactgacaagctggccttcgatgtgggactgcaggaggacgcaacaggtgcagcagctggaggggatgggggtgtgaaggggccccgcagcagggattcagggggtagaaggtctgcagaacgccaaggcaagcatgagactaccctggggacatgaatgggggcttcgtagcagagagtctgcggtacagtccagacagggagacagacacacgttggggaccactaggcagagagtctgaagtcaggaacggggaactgttaggcagagagttggtggcagtgataggagagttgtgggccaagggcccgggaggcctggtggagggagagccctggggaagagcattctgggaagccatcatctgacagccacccccattccatccccacccataggagaggcttgctggtggaccatgcacccagcctccaagcagaggtctgaaggagaaaaggtccgcgttggggatgacatcatccttgtcagtgtctcctccgagcgctacctggtgagccattgcggttcctcctgctcccaggtctgggggcgcatgggatggtccccatcttctcaccatgggtttgcctggctgatctcccacccccaaggtcctgactcccaatttcccatttcctgacccctgacatccaattttctgatttctgacctcccattgcccgacttgatcatttcctgatctgtgatctctgatgactctgtctcccatctgccggtttccgggtatccacccttgatttctggcctctgacgctgggactctcgcccacccctgcaatcgtctctgactgccgcatcctggtggcccccagcacctgtcgaccgccagtggggagctccaggttgacgcttccttcatgcagacactatggaacatgaaccccatctgctcccgctgcgaagagggtgagggccccagacctccccctaaatggagatccccccaaaacagacccttaatgttgcccttcaggcatacccaaatggagccttggaacctcagacctcaaacctagatctccaaattatggctctcacacttagatctccagctgaccccaaatccagacccccagagctcagaacccccccaaaccccgaactaaatatcaggctcccaaacttagaccccaaagtattagcccccaaggctcctaaactcagattcaaatcttaaaacatcaagtttaaagcttgtttaaaggccgggcatggtggctcacgcctgtaatctcagcactttgggaggccgaggcaggtggatcacctgagttcaggagtttgagaccagcctggccaacatggcgaaaccccatctttattaaaaatgcaaaattatctgagtgtggtggcatgtgcctgtaatcccacctactcaggagggtgaggcaggagaattgcttgaacctgggtggcagaggagcctgggtgacagagccagactctgcctcaaaaaaaaaaaaaaaaaaaaaaaaaaattaaactccttagacaataagcatagactatgatctcagcccctcaaacccagacccccaaattcaaacctcagatccccaaaccaagactccaatcttcagccctccaacctcagacttccaaacttcaatttcaaatcccaaaaaccaaaatccaccaaagcaaactcccaattcagattcccatgctaagactccaggcatggcccaatactttgaccccaagtctcataccccaaacttcagagtcctaaaccagacccacgctgggactcaaaccacagatggtttttgaccctcaaactcagaccctgaaactcagactcatcaacttctaactacaaagctcagatcgttcctacgtcataccccaaagctcagacttccaaaccctagattgtaacctcagatccccaacctcactttccagcttctggcctccaaaatcaatactcaaggccaagcgcggtggctcacgcctgtaatcccagcactttgaggggccaaggcgggtggatcacttgagatcaggagttcgagaccagcctgggccaacatggcaaaaccccatctctactaaaaatacaaaaattggctgggcatgatggcgggcggctgtagccccagctacttgggaggctgaggcagtattgcttgaatctgggaggcagaggttgcagtgagccaagattgcaccactgcactgcagcctgggcaacagagcaaaactctgtcttaaaaacaaaactaaacaaaacgaaacaaaaaaaccctcaaaattcaggccctaactccagaacccagcctcagacccaaccatcacccttctaaacccagaggccaaacctcaaccctagaactcagactccaacaccagtgaacattagacctccacctttcaccacacacacactctgaccccaacctcaaaagtccaaactcagaaccttaaatgacagactcacaactcccccagcctcagctctgcagacccagaccccccaaattaggtgcccagcttcagaccccaagtctcatatccccacttcaggcctcaaccttggcctgaaaataccctgaaactcagacctccaactgcaaaaccccaaactcagccctcaggttcccccaggggaggagcagggcccctgacttcatcttggctcctggtcttcctggggctccagcctcccattgaccaacttcccttgctcctctccaggcttcgtgacgggaggtcacgtcctccgcctctttcatggacatatggatgagtgtctgaccatttcccctgctgacagtgatgaccagcgcaggtctgggctgtggacgagagggcctggggtctaggggtggacgtggagggctgggaccctatgagtaggattagggaccagattccggggagctgaacccttgacttcactctcttctgtgtccccagacttgtctactatgaggggggagctgtgtgcactcatgcccgctccctctggaggctggagccactgagaatcaggtagggcggggaagatggggagagaccagggagaggctggggtcacctggcaggctgggaggacagaaaaggtcttgagggaagatctgataaagagactgaagggtctcgagggaaaatcagagcagcctgagagagagatgaaaatctcggccaggcgtggtgacttcatgcctgtaatcccagcactttgggaggctgaggcaagaggatcactggaggccagaagttcaaaaccagcctaggcaacatcatgagacccccgtctctgcaaaaaaaataaaataaaataaataaaataaagaattagccgggtgtggtggtgtgcacctttagtctcagctactttgtggggctgaggtgggaggatcactcgagcccagcgggtcaaggctgcagtgagctgagatcctgccacagtactccagtctgggtgacagagcaagatcctgtctcaaacaaacaaacaaacaaaacaaaaacaaaaagaggccaagcgtggtggctcacgcctgtaatgccagcactttgggaggccgaggcaggtggatcacttgaggtcaggagttccagaccaggctggctaacgtggtgaaaccctgtctctactaaagatacaaaaatttgcctggtgtggtggtgggcacctgtaatccttgctactggggaggctcaggcaggagaatcccttgaacccaggaggtggcggttgcagtgagctgagattgcaccattgcattccagcctgggcgacagagcgagactccatctcaaaaaaatacaaaaacaaaggccgggggcggtggctcacacctgtaatcccagcactttgggaagccgaggcaggtggatcatttgaggtcaggagttcaagaccagcctggccaacatggtgaaaccccgtctccactaaaaatacaaaattagccaggcggtagtggcacgcacctgtaatcccagcttctcgggaggctgaggcaggagaatcacttgagcctgggaggcagaggttgcagtgaggtgagattgtgccactgcactccagcctgggcaacagagtgaggccctgccttaaaaaaaaaaaaaaaaacaagcaaaacaaaaataaaaaatgaagtctctctggagtcctgtgggaaaaggaggtttggggggtttttgagggagagattgggggccctgagtaaaatgatgggggaatttaggggtctggaaaaacgagggcactggagacatttgggaagccctgaggaagctgtgaaggcctgagagaggattggggttcctaagggaggactaggggtcctaattaagatggtttgaggaacactggaagagggttcggggcttgaggaggtttggaccaagactatagtgtccaggccgggtgcagtggctcatgcctgtaatcccagcactttgggaggccgaggtgggaggattgcttgagccctggagttcaagatcagcttgggcaacatagcaagacctggtttctgtaaaaaaaagaaaaagaagaaaagactgtaatgtccatgggagaactggggggtcctctgactccccttggctctcaccctccacagctggagtgggagccacctgcgctggggccagccactccgagtccggcatgtcactaccgggcagtacctagcgctcaccgaggaccagggcctggtggtggttgacgccagcaaggctcacaccaaggctacctccttctgcttccgcatctccaaggtcagtggggtttgtggcgccctccctcacctgaagcccccagtcccagcccagcctgcactctgcagtccctcaggggggctcccctgctaaacacacaggcagaggaggctgacctgtgtcccctgcccctgtaggagaagctggatgtggcccccaagcgggatgtggagggcatgggcccccctgagatcaagtacggggagtcactgtgcttcgtgcagcatgtggcctcaggactgtggctcacctatgctgctccagaccccaaggccctgcggctcggcgtgctcaagaagaaggtgggtgtaatcccagctactcaggaggctgaggtgggagaatcgcttgagtccaggaggtcaaggctgcagtgagctggtgatcatgccactgtactccagcctgggtgacagagtgagatggggtgcaggagggtactgaggggtggtgcttgagaccttgggagtttgaggatgagactgagagaaagatagagactgggagagaaactgagactgagagaaacagcaaaaaagacaaagggatatatctacatggagagagagagagagcagaaatctgtagacagacagggaaaggcagagataaagaggcatggaaacagagaaatagagaaagatagagacagagaaacagagacacggccgggcgtggtggctcatgcctgtaatcctagcactttgggaggcccaggcggttggatcacctgaggtcaggagtttgagaccagcctggccaacatggtgaaaccctgtctctactaaaaatacaaaaattagccaggcgtggtggcagctgcctgtaatcccagctactcaggaggctgaggcaggagaattgcttgaacctgggaagtggaggttgggagtgagccaatatcgtgccattgcactccagcctggctgacaagagtgaaactccgtctcagaaaaacaaaaacaaaacaaaacaaaaacaaaaacagagagagtgagaaaaagatggataatgaccaactgagaataactttcaacaaacaattactgagtacccgcgttgttctggttgtgtgtgcagaaaatagatgagctgtagcgacctgttccctgccctcccagtgctcagaaattgtgaacaaactgcctttagtgaagtacatagttttacaattaaggagtgggaaaactatttttggcagcaggaacagcatgtgcaaaggtcctgaggttaacatgagcttggcttgttgcagtagcagaaagaagccacagtgtggaacagggtgagcaggctggagtagtggttggtgaggaaagagaggggatgggaacagctcgtgtgaggccttgtgggccatgggagaggtctagttttgtttgtttgtttgttttttgtagagacgaggtctcattatattacacaggctggtctcaaactcctggggctcaagtgatcctcctgcctcagcctcccaaagtgctgagattaaagtgaagtgtgagccactgctcctggccaggttctagtttttatcctgagtgagatgggctcacaggagattttgagcagggcagggaagtgacctgacgcaggatcacagaattcttaggctgtctctgggaacagactacggtcaggggacagagccagagcagggagaccagagaagagactgccatgatgttacaaatgggagatgacagtggacaggaccaggaggggactgtggagttgggaagagtagtagattctggtggggtcctgagggtagagccaacaggatttgctgacagattggctgtggggtgagagaaggggaggggttgaggatgatgccatgattttttgccccaagcaactggaaggatggaagtgctgaaacagcctcattgtctggagtatcacccaaggtttgtggtctcacagccacagagaacaaggacgcagacacacaaagagtgaggttaagaggggacatttaataggcgaaagaaggagctctctactgcagagaagggtcccagaaaaatgggttgaaatgcagggggttccatggtgaaatgcagggggctttacagatgagctggtggggaggtggtatctgatttacctagggtgcaaaagactggttggaccagttgtgccatttgcatagggcacaaatttctggctgcctccaccctaagcttttattgtacaagcgggtcctctgcctgagctggccatgttgcccattccttttctgtacaacgtggaaacaataaataaataaataactaaataaagggaagatggagcctccatgttggacatgcgtagccccaggtataccttttctatcggcacattcccccatgcaagcttgtagctcgattttccaggctgctctttgttagaaaagaaattattttgggggctgctttccgttagaaaggaaactctgccgaggactctgttgcccttactctctgcctaaataatttttttctacctcttgtatcagtgccatcaaccaagttaggggacagtcagtgttggctcagaaggacagggatcttaggctttactgccagtgcctagaacagagccacttactacagccttgctgaatggacaagtaggaatccttggggaggcactcgtttgcaaaaacaggcctgtagttgaatacatgagccaagggcgtagagacggggcctgggccatgtccaaagtggggacacgtgagcatcatcagcaggtggatggtgtttacagccgcagactggatgagttctggggaggtcggcttggggtgaagctggcagccatgatggtctcacctcgtggaaaggtggtctggcattctatctgggacaggttcaatttgggggttagagctttctggtcggggggaatgttaagtcagcagtaggtacaggtggaaagggtctggcctggagacagagacaggaaggagatagggatagagagatagagagggagaggcagggacagaggtgagagagatagagagacaaagacagacaaaaccaaaaacagggacagagagagacagagaggagagagagaatcaaagacacagaggagacagatgacgggggacagaaaaatgaggaggaatttgcagtgagattctgcagagcagggaggagggggcaagtgcagaactcaagtctagacagacgtcttgggggcatggccctgggtggctgggcccactccagacctctgtctccccactcctaggccatgctgcaccaggagggccacatggacgacgcactgtcgctgacccgctgccagcaggaggagtcccaggccgcccgcatgatccacagcaccaatggcctatacaaccagttcatcaagtgagcaacctgccctccctgctggggtgactcctgtgctgtcccatgctccgggcatccatacacttggcctctttcatctctacctctgttgcccacacccttgtctaacatatacatgggccaagcgcagtggctcacacctgtaatcccaagactttgggagggcaaggcatgaggatcgcttgggcccaggagcttgagaccagcctgggcagcatagggagaccccgcctctaccaaaaaaaaaaaaaaaaaaaaaaaaattaggctgggcacagtggctcatgcctgtaatcctagcactttgagaggctgaggcgggcagatcgcttgagcccaggagttcgagaccagcctgagcaatatagtgaaaccctgtctctataaaaaaaataacaaaatattggccaggtgtggtggcacgtgcctgtagtcccagctgcatgggaagctgaggaaggaggattgcttgagccgagggggcagaggctgcagtgagccactatactccagcttcactgacagagcgagacccttctcaaaaaataataacaataatatacacatgacccctaacctctaaactcctgacctctgtacacttgacccctaatctgaccttgacaaccatgatcacattcctgatcatcacccaactttcacacccctgacacccagagcctggaccctggacctctccatccctgagttccgggacccccctgtacctacacaggagcgagtcccagtcccagctctgcccttggccattgtgtgacctcggacaaatgcttttccctctctgcgtctcggtctccctctctgtaaaacgggtgggtctgggggagtcttgcgggagtgaggttgcggcagtgacgttgcggcagttagcgctcccagccgtggctgacagctgcgaggtccctgtaggagcctggacagcttcagcgggaagccacggggctcggggccacccgctggcacggcgctgcccatcgagggcgttatcctgagcctgcaggacctcatcatctacttcgagcctccctccgaggacttgcagcacgaggagaagcagagcaagctgcgaagcctgcgcaaccgccagagcctcttccaggaggaggtgaggacgtggcgagggcggagcggggcctgtgggcccagggggcgggaccactgaggggcggggccacggcgctgggcggggcagggcctgagggacctggggaagtagggtctgagaagggggcggggcaggagaaggagccggacaggaaccccagccagtgagaacacgatggggcggggccttgggaggggcgggcctgctgtgctggtgggcaggacctttgggaaggggcagggcgtatggccgaccagggggcggggcctggagagaaggatggaataaaagagctgaggggcggggcctatgtgaagctcaggtatagggtgaggcctggggaggtgaggccaggagtggggccagaggtcagaggtagggctgccgactcagcgggcggggtctgctggcgcggggtctgtggggtgggcggacagaatcagtgtggggtatgggaggtgccgaggcagaaatagatctttgggcattagggaggggaggccagctgtgaacaaaacagaaaaaaatctctgtccttatggagttgacatggcggggagagacaggagatcaataaaataaataagtaaattgtatggcatattagatggtaataactgttaaagagaaaaattcagcaggtaaggggtagggagtgttggggttttgcagtttaagacagagctgtcagacagggtgacctggaggaagagaggaagccatgtgcaaaggccatgaggtgggcgggtgtttggcatgttccagaaacagtcaggtggtgattggagcagggaggcttgggtgggggagtgggaggaaatgagggcagagaggtgacgagggccaggccttggtgaggactttggctttgggagccacaggaggttttggtcctctacagtcacagctagttagtggcagagccggtcagtgtgatgccactttggttgtgctctccactttgaggcactgctcctctcactactgatctaggccccaggatgcagatacaacaattgttttgttttgtcttgttttttgaaacagagtctctctctgtcacccaggctggagtgcagtggtgtgatcttggctcactgcaacctccacctcccaggttcaaatgattctcctgcctcctcagcctcccaagtagctgaaactacaggtgtgagccaccacgcctggctaatttttgtatttttagtagagatggggtttcgccatgttggccaggctcgtctcaaactcctgacctcaggtgatccacccgcctccacctcccaaagagctgggattacaggcgtgagccactgcacccagacagttttgtcctttttgttgatttcactgtttataatgtctcccaagtgtagtgctgaagtgctgtctagctttcctaagtgcaagaaagctatgatgtgccttactgagaaaatatgtgttagataagcttaattaaggcatgagttatagtactgttggctgtgaatttaatgttaatgactcaacaatatatattaaataactgtctttaaacagaaacataaaaaacaaggttatgtaataagtggttgatgaaaatactgtcacagactctcagggactccctgtatttcccctagaagcagtggttcagtatttgataattcagtcttcataatcactttatagaacataactatgaataatgagaattgattgtatatgttttatgtacttttctgtatgtatattatgattcacaatgaaataagaaaaaatattaaaatgtaaaaaaaaaaagaaaagaaaagataaagtgagaaaaatctttctgatggttggtgtggagaatgaactgggcctctccagttggtgggagtggggttccagttggatggttggtgggagtggggttcctggaagtgagtaggatggagagaaaagtgcaggaaggggaagtataaactcagtcctggtgttaataaggactgaattatcatagactgaatctcatattggggatagagtcagagaggacaagaatagatatggggagccaaggaggagaggagagcaatgggactgattgggaatatgaaaccaaaggggctgatttagatctgggaacacaccgtcactagttgttgaaggaatatgaattcgtgaatccaagaaagacaaggaagggagggcctgggtctcctattgtgatgcctcttattttcctcatcctaggggatgctctccatggtcctgaattgcatagaccgcctaaatgtctacaccactgctgcccactttgctgagtttgcaggggaggaggcagccgagtcctggaaagagattgtgaatcttctctatgaactcctaggtaggggtcccagtcctgactcccctgagaacaccccagatccccagtcctattggatctgacacctcttcccccctcagcttctctaatccgtggcaatcgtagcaactgtgccctcttctccacaaacttggactggctggtcagcaagctggatcggctggaggcctcgtctggtaggagaacccgggggagtgggacagaggcttgtgggaggggatgggcatggccgcttcacctctcattctgggcaccctggcaggcatcctggaggtcctgtactgtgtcctcattgagagtccagaggttctgaacatcatccaggagaatcacatcaagtccatcatctccctcctggacaagcatgggaggaaccacaaggtcggcccctcacccctgacctctcatcccctgaactctgaatgctggcctctccccagggctccagaactctgctcactccctcacttccctcctccatctcatctctcacctgtacgccactcccactggctttcatctccacacaggggtctcaaacaatgactcttaagttgattctgggccacagatgtgcttggttagatctctgaaatgttttttttttttttttttttttgagacagagtctcacactgtcgctcagactggagtgtagtggcgctatcttggctcactgcaacctctgcctcctgggttcaagcgattctcctgcctcggcctcccaagtagctgggactacaggcacacaccaccacgcccagctaatttttgtattttttttttagtagagacagggtttcacaatgttggccaggatggtctcgatctcttggcttcatgatccgtccacctcagcctcccaaatgctggaattacaggcgtgaaccaccagcgcctggcatttttttttttttttttttgatacagagtctcgctctgtcacccagactggagtgggagtgcagtggcatgatctcagctcactgcaacctctgcttcccgggttcaagcaattctcctgcctcagcctcctgagtagctgggattacaggtgcccgccaccacgcccagctaatttttgtaattttagtagagacagggtttcaccatgttggccagtctggtctcgaactcctgacctcaggtgatccacccactttggcctcccaaagtgctgggattacaggtgtgagccaccgtgccccaccggtggcgctgaaatgtttttaaaattttcaaatattacagcctctaggtggactgtatatatatacacacactctgtagtttgccatagccctacaagttcctgttgcattatttctaaccacttcacacatttattcagtcggagcaaaagtaattgcagttttgctattaaaaggaatgacagccgggcatggtggctcacgcctgtaatcccagcactttgggaggccaaggcgggcggatcacgaggtcaggagatcgagaccatcctggctaatgcggtgaaaccctgtctctactaaaaatacaaaaaattagccaggcatggtggcaggcgcctgtagtcccagctactcgggaggctgaggcaggagaatgatgtgaacccgggaggcagagcttgcagtgagctgagattgcgccactgcactccagcctgggcgacagagccagactccatctccaaaaaaaaaaaaaaaaaaaaaaaaaggaataacaaaaaccagaattacttttgctccagcctaatacattttccacttggcccctaaagacacaagtttgcaacccctgctgatttaaaatttcatcttgattcctgtgtctctcactggtcgtttcagtctgccttctgacctcttacctcactactccagtatctccttccttacattgctgataccttatcccaactcatgtgaccctccctcagcctcttgccagatcttcctctttgacccctaacctttctctgatccctgaccttccactttcaccacctcctctcagtcaaaattgccacatcttatcccgatgcgctgtcctttcctcctggcttccctccctcccagggttcttctgtagatcctgccctggtgcctacacaccctttaacctctgaccttgacctctaggtcctggacgtgctatgctccctgtgtgtgtgtaatggtgtggctgtacgctccaaccaagatcttattactgagaacttgctgcctggccgtgagcttctgctgcagacaaacctcatcaactatgtcaccaggtctggctctcaacatctgaccccagaactcagaacctctcaaccctctccctgacttagagactccacacccagatggatgtcctttccttaatctcccaccccagggttaacaaccagtcctcacagatgtccactgtggccccactctcccttggcatccactcctcttgttctgtcttcctggctccatttctgcctctatctgtttctctttctttctccctctccctctctctctgttttctctttttatctttgcctgtttctgtcttgattcttcctccatgtctttctccctgtctctctcccatctctctctctctgtctttggatgtctgtctctctctggcttcccaccacttggctctcctctctgcctctccgtcatccccctctcctgtcccatctctcctgcagcatccgccccaacatctttgtgggccgagcggaaggcaccacgcagtacagcaaatggtactttgaggtgatggtggacgaggtgactccatttctgacagctcaggccacccacttgcgggtgggctgggccctcaccgagggctacaccccctaccctggggccggcgagggctggggcggcaacggggtcggcgatgacctctattcctacggctttgatggactgcatctctggacaggtacctgaccccttccaggggaccctcacccctgaccattgaccccagcatttctaagtctctgaccatacaccttggggttctcaggatcctgactccctgaaaaggtcaacttttgaccttttagtcctcatttcccaagaccctaaccccagagcttctagattcccggctctgacttgtatcctcgttacctacagaactctgatcccagagtaggtgtgacctctgaccctagatatcccagaagaccacgcagattactgtgatctctgatctttgacttctaaccccaggagaatttatttatttatttattttgtttgtttgtttgtttgtttgtttattttgaaatggagtctcactctgtctcctaggctggagtgcagtagcatgatctcagctcactgcaacctctgcctctcgggttcaagtaattctcctgcctcagcctcctgagtagctgggattacaggcatgcaccaccacgcccggctcatttttgtatttttagtagagacagggtttcaccacattggccaggctggtctcctgacctcaagtgatccatccgccttggccttccaaagtgctgggattacaggtgtgagccactgcatccggcccccaggaggatttaatctctggccccacagctcagaatcctaacttcaggggaaccctgacctctgcccttcatttcagagctacgggagcatccaagggagcactttccattagggtttccaggatgcaatctccacaggagcctccaatatctgtcccttttctcttgttatcattggttctgtgggacctgtgacgtctgacccatctctggtgactgatgcaggacacgtggcacgcccagtgacttccccagggcagcacctcctggcccctgaagacgtgatcagctgctgcctggacctcagcgtgccgtccatctccttccgcatcaacggctgccccgtgcagggtgtctttgagtccttcaacctggacgggctcttcttccctgttgtcagcttctcggctggtgtcaagtgagaacttgcccccaccccacggccagtcctcagacctaggactgacctgagacagcttccccagtcactccatggtcccccaggaggccaggacactgcagcctaccatcaagactgactggtgtccagaacccttacttgaagatcccagggacctccacgtgactccagactctttccaatgacctcagattctccctaaccccacgtccttccagtaacctctgagataatggtctcagactctcctagtggtctctcaacaacccaaggttcttccggtgacctcccaatgacctcagactttcccagtgactccagaatctgatgatctcatgactccagaccttccttgactccccagtggcctcagactctcccaatgactccagaatctgataatgatctaatgactccagaccctccttaaccccctaatgacttcagactcttccaatgacaccatactctctcaataatctcttaataatgccagcatctcccgatgacctttcaatagacccagacttgcccagtgaccctgctcccgaataaccccatttattccaaagaccccccaatgatccagtcctttcccaatcaccccaagctctccgaatgtccattcagtggtgtttatgtttatttcataattgtaacagatgctcagtgacttctcaaatgaccttcttattggtctccccaaccttccaatgaccccgaatgctctgttgacctggggtctcctctgaaggactgttccatgaccttgcagtcatctgaactcttctagattaaccagagaccctcccgctctcaactccctggctcttaattcccttatgatattcctttgactctagactttcttttatgacttctaaatgacctccaggacactatgactgcccggtgacctttggtctccccagaactttccattgatcccaggactgcttccatgtcccccactgaccacagactgtcccccataacctcccctcaatgatccccattgtccttccttacccagggtgcggttcctccttggtggccgccatggtgaattcaagttcctgcccccacctggctatgctccatgccatgaggctgtgctccctcgagagcgactccatcttgaacccatcaaggagtatcgacgggaggggccccgggggcctcacctggtgggccccagtcgctgcctctcacacaccgacttcgtgccctgccctgtggacactgtccaggtactgcctgccctgcaaaggttttctggcgaggcagggtctcttaggagtcagagagggggcagggtgccatcgttcatgcctgtaatcccagcactttggatggccaggcgtggtggctcacgcctgtaagcccagcaatttgggaggccgaggcgggtggatcacctgaggtcaggagttcaagaccagcctggccaacacggtgaaagtgaaaccctgtctctactaaaaatacaaaaagttagctgggtgtggtggcgggcgcctataatcccagctactcgggagactgaggcaggagaatcgcttgaacccgggaggtggaggttgcagtgagctgaggtcacgccattgtactccagcctaagcaacaagagtgaaactccatgtcaaaacaaaacaaaacaaaaaacaaaaattagcatggtggcaggtgcctgtaatcccagctactcgggaggctgaggcagaattgcttgaacctgggaggcagaggttgcaatgagccaagatcgtgccactacactccagcctgggcaacagagtgagacttcatctcaaaacaaacaaacaaacaaaaacaaccaacattttgggaagccgaagtgggggcctcgcgcttgagcccgaaagttcgagattagtatgggtaacatagtgataccccgtctttatagaaaaaaatttttaatatttacaaatttagacaattttttaaaaggagtgagagaggtggggagctgccctagaagctgggaacctcgttgtttaacagatggagaaactgagcacagagaggcaaaggattctgtcagagcagaatcgcagtctcagggagtcctcaccactgccccacaaagaaagggtggctcacacctgcgatcctagaactctgagaggccgaggcaggattgcttgagtccacgagtttgagaccagcctaggcaacatagcaagaccccatctctactaaaaattaaaagttagctgaggtgatggtccacgactgtagtcccagctacttgggaggctgagatgggagggtcacttgagcccagggattcgaggctgcagtgagctatgattgtgccactgcactccagcctgggtgacagagcaaaaccctgaaaaaaaaaaaaaaaaaaagaaagggagagagagagagaaagaaagaaaaaggctgggtgtggtggctcatgcctgtaatctcagcactttgggaggctgaggcgggcagatcacctaaagtcaggaattcaagaccagcctggccaacatggtgaaaccccatctctactgaaaatacaaaaatgagccaggcatggtggcaggcacctgtaatcccagctactcaggaggctgaggcaggagaatcacttgaacccgggaggtggaggttgcagtgagccgagatcgcaccactgcactccagcctgggcgacagagcaagactccatctcaaaagaagaaagaaagaaaggactgtttttgccttccctccaagcatgtccctataggagggaatataggttaggtttaaaagcctgacagcaaaggtttggttttcagtcacgtgatcttgggcatgtgacctcccctccctgagcctcagtttgttcctccgtgaggaaaaggggataacaccctgatatctgatagcattgttcattgttgtgaaggtaagatgaatggatataggcaagatgcttagtccagtcctgattaaacagtaagcactcaagacagtcactcattattagtagcagtgatatcatctgcgggggtgacttcatccccctgtccccagaccagtgccctgggcctcaccctggatgcctctgtccccatcccccagcctgtcagcctcgtgggctgtccactcggcctcccagacatccccccgaccccgctttcctcatccccatgtcccgcccaagtccaaaccatcattgcctcttgcctgcggaacgccaacaccgctactgtctactaggctcttaccctctgccaggcatcgatattaactatgtaacatttagtaatttacattaatgatctcactgagtccttattaggtatcgctatgatcctcatacggagaaggaaggagactcctccattcttttcattcagcaaacatttcctgagcctctcttctgggtctgagtctggttctgggctggatagggctggggacttggtggagaccagggcagccccaggccctgccctcatggagctcccagtccacgggggagacagacccgtcccagataattccttaatactctctcttcttttttttttttttttttttttggagacagagtcttgctctgttgcccaggctgaagtgcagtggcacaatcttggctcactgcaacctctgcctccagagttcaagcaattctcctgccttagcctcccaagtaactgggactacaggtgcgcaccaccacatctggctaattttttgtatttttagaagagaaggtgtttcaccgtgttgcctaggctggtcttgaactcctgacctcaggcgatctgccccccccccccccacttagcctcccaaagtgctgggattacagatgtgagccactacggctggccctggataattccttaattctgagaatgctaagccctcacccatctgagtgtcaaccctggagtcaaggcgagggatggggagcagggctgctggatggtgggaaagggggtgctggaggagcctcccagggctcacaggtgttcttggaaagaggggtcatgatggaggagggtagagggaccttggggtctcaagaacgtccctctgcctctagattgtcctgccgccccatctggagcgcattcgggagaagctggcggagaacatccacgagctctgggcgctaacccgcatcgagcagggctggacctacggcccggtgaggggctgcctgcagcctgcgggaggccggctagacttgcggtgccaggagggagagcggctcaccggcggagaggagggagggaccacagggcaccagggggtccttggactgagggtggcagaactagggttggaggtcaggggtcatagtctgggcatgtggggagtgggaaggaaaggggagcacatggagttgaccctgggttttctccaggttcgggatgacaacaagaggctgcacccgtgtcttgtggacttccacagccttccagagcctgagaggaactacaacctgcagatgtctggggagacgctcaagtgagggcccaggggagccgggggttggggctggctgctggtgcggtgggggagggaggcatggagagacagggcaggaggtagagactgagagagagaaggatggaggggacagggattgtgagacataaacaaatggggagtggccgggcacggtggctcacacctgtaatcctagcactttgggaggccgagacgggtggatcacttgaggtcagcagttcgagaccagtctggccaacatggcaaaaccccgtctctactaaaaatacaaaacttagccgggcgtggtggtgcacctctgtaatcccagctcctcaggaggctgaggcaggagaatcatttgaacctgggaggcagaggttgcagcgagccgagatcacactactgcactccagcctgggcgacagagcgagacaccgtttcagaaaaaaaaaaaaaaaaaaaaaaaaaaaaaaagaagcaaacggggagcaagaaagggacagaggcagaaagagagagaaagaaaaggtggggatggaaagagagagagatgcagaaagagacagggagacaggagaaagtggcagacaggaaaagacagacatagttagttatacagacaaggcgcagggaaagacagaagtcatgaagcctgaggccaggatcaagagagacagggccagagcgccccaggcactgaagcagcagaggtagagggagctggagaccctgaggccgtgggaggagacggggcagggagctctgaggggcgtgacctgtcgcctccactcccccacccccaggactctgctggctctgggctgccacgtgggcatggcggatgagaaggcggaggacaacctgaagaagacaaaactccccaagacgtgagtgtgggcagccaggtcccgtctggggatggactgggggctggggatgctgtgctaagggctggggaggtcgaggggtcttgtggggaggctgaggttagggaggaaggagacttgggttagggtgaaggtcatagggtcagggctctggggtcagaggtgaatgtccaggattgaggagttaggagtttcagagagagagagagggagggtatgagtccaggatccaggctcagggtctgcctagagtcagggaaaatgagagcagaggtcacatgtccacgtaaggggtaaggggccaatggtaagaggtgagaatctggaggtcgttggagtcgtctaagtaagggatcctgaaattataggtgagcagttacacgtcctgagttcagaggtcaaggactccagacccaggagtttggggtggatgaggactgggatcagagtaagaaacctcagagtgggctgggtgaggtggctcacacctgtaatcccagcactttgggaggttgaggcaggaagatcacttgagcccagttcaagaccagcctgggcaacatggtgagacccctctacaaaaaatttaaaaattagcaggacatggtggtgggacatgcctgtagttccagcaacttgggaggttgagatgggagaattgcttgaacccaggagtttgaggctgcagtgagccatgattgcaccaccgcactccagcctgggtgacagaacgagaaaacaacctcaaaaaaacaaaaagagccgggctcagtcgctcacgcctgtaatccgagcactttgggaggccgaggcgggcggatcacctgaggtcgggaattcgagaccagcctgaccaacacggtgaaacccaccctctaccaaaaatacaaaattagccgggtgtggtggcacatgcctgtaatccctgctactccggaggctgaggcaggagaatcacttgaacccaggaggtggaggttgcagtgagccgagatcgtgccattgcactccagcctgggcaacaagagtgaaactccgtatcaaaaaaaaaacaaagagagagaaaaacctcaaagttagtggtgagaggtctgagagagttccggggttagagataggggtcccaaagtcaagacaaagggggctagaggtcattgatgtcaaagcccttgctagggtcccaggatcctagggtcagaagccagggatctcaaaacttattctaaaatttcatagaactgcaacattatatcaaaggtcagaaacgccgaagctgggacaagggtcagcagtcagggatcccatatagtgcagagcccggaagtggaggtgagggccttgtcccatggagccctaccatgcccgcaggtatatgatgagcaatgggtacaagccggctccgctggacctgagccacgtgcggctgacgccggcgcagacgacactggtggaccgtctggcagaaaatgggcacaacgtgtgggcccgagaccgcgtgggccagggctggagctacagcgcagtgcaggacatcccagcgcgccgaaaccctcggctggtgccctaccgcctgctggatgaagccaccaagcgcagcaaccgggacagcctctgccaggccgtgcgcaccctcctgggctacggctacaacatcgagcctcctgaccaggagcccagtgagtgctcacccctggccctggccctgactcctaccccaactctgaccccagccccgatccctgatctctgacctgactcagcccccaaatgggctatatctttttttttttttttttttttgagacggagtctcgctgtccccaggctggagtgcaatggcgcgatctctgctcactgcaagctccacctcctgggttcacaccattctcctgcctcagccttccgagtagctgggattaccggcgggtgccaccacgcctggctaattttttgtatttttagtagagacaggatttcaccgttttagccaggatggtctcgatctcctgacctcgtgatccgcctgcctcggactcccaaagtgctgggattacaggcgtgagccactgcacctggcccaaatgggctatatctatcacatcgagcagactgaccaggaggtcagaaaggactgacccctccccgaaactctgagccttaccccagttccaactcggaacctgatggaaccacttccctttacctgacgccagccctgcctgggctatgactgcaaaccagagccgtcagcctaggaacccaatgagtgccaaccccacctttgactctgattcctgacctctagctttgatccctaatcactaatctctgaactgtagctaccacatgaaggcacccaaccaagggcttagagagcctggtcacccctacccctaacctgactcctgacctatcactggcttccaatcccagccttgaccccaaaccctggccatggtccccaaccttcagtttctcaactcttggccccaacctgaatttccatcccttccataatcctggctctgaccctccaatcctggtctcagcccttcattctaatcaaccctgatcttgacccttaaccccagaccataactctgaccagttcactgagctggctttttccttctgtgtctctgccagtatccctgttttctgagaattctgactgctacagagatgggggtctctctcaacaggtccctgcctctctctgacttttctgaggttccccaattctcctctaactccaagaaattgaccctcttccaacagttccccaaagcccttactgtcccccaaagcctgtcttctaccaacttctcgatgtcttgggatccacatcttccctagcctctctgactctgcctggcctcatttataggtcaggtggagaaccagtctcgttgtgaccgggtgcgcatcttccgggcagagaaatcctatacagtgcagagcggccgctggtacttcgagtttgaagcagtcaccacaggcgagatgcgcgtgggctgggcgaggcccgagctgaggcctgatgtagagctgggagctgacgagctggcctatgtcttcaatgggcaccgcgtgggtacctccctgggcaccattctgccaggtcctgtggtctctcccacagcttgtctactctggccctgcctctgtctgtgcctcactctgtccccacttcatgcatctactgtaccactcatccacccatctatccatccattcaaccaatgattcatccatccatccatccatcgatctatcagacatccatctatccaaccaacaattcatccatccatccatccatccatcatccatccatccatccatccatccatccatccatccatccatccaaccatccatccagctaaccaaccatccattcatccagccaacatagggagaccccatctctacaaaaaataaaaaaattagctaggcaaggtagcatgcacatatagtcccatcatccatccatccatccatccatccatccatcatctatccatctgaccagccaaccatgcatccatccatgcattcaaccatccatccatcatccattcatccctcatccatccaaccaaccatccatccatccattcttccagccaactgtccatccatccatccaataaccatctgcccatccaacaaccatttatacaaccatccttcccttcttccctctatctgtcatccatttatttatgcttgcccctacttacactttgttctttctctgtatcaacccaggtaaactctcaactttccaatcattcttctgtccagccatgtacccaatttctcatccatctatctgtctcattagccactcatctattttgtgcatgtatataagcatatatggatctgtatggggacactgataggttcatttttcctttccatccctctacttactgctgcttccagccccccactaccactttggtggtctgcataatgctagccatggcaacagcagagaacccaggcagaagggatgagacacagagattagtggggagaaaaattcctgtgatcatggatgcaaatgtgaggaaagatggagacactgtggggtgacccctcttccataccacctgccctgaacctgacacttcgaatgtctgtcttcatatatctctccctccctgcttccttatctctccatttctctgtgtgtctccccacaccatgtcttctctggctgtcctcacagggccagcgctggcacttgggcagtgaaccatttgggcgcccctggcagccgggcgatgtcgttggctgtatgatcgacctcacagagaacaccattatcttcaccctcaatggcgaggtcctcatgtctgactcaggctccgaaacagccttccgggagattgagattggggacggtgagggctgagaccccttcacatgccctttcttgttttcctctgtctctcccaaccctgcactgcccttctgcctccaactctcccatccctacctcctcccctcggctccctctgccctgcccacctgccctcacccctgcccatccatcccctcccaccaggcttcctgcccgtctgcagcttgggacctggccaggtgggtcatctgaacctgggccaggacgtgagctctctgaggttctttgccatctgtggcctccaggaaggcttcgagccatttgccatcaacatgcagcgcccagtcaccacctggttcagcaaaggcctgccccagtttgagccagtgccccttgaacaccctcactatgaggtaaggactgagcccctcaatgccttctcatctgcctccaaagctccttccttccacagtgctcttctttgagtttctcttttccctccatgttaggacacaaaccacatggaagcaagtgtcagagtgatgggctcacgggctgtatgactccgggtgtaactttggcaaaccacagcttcctgaggtccaggtgcctcacctataaaataagggaaaccctgcctgggcaacaagcaaaactccatctctaaaaataaaaaaaaattaagtctaggcatggtagctcatgcctgttatcccagcacttagggaggctgaggcaggaggatcccttgagcccaggagttcaagaccagccttggcaacatagggagaccccgtctctacaaaaaataaaaaaaaaaattagcaaggtgtgtagtatgcacatatagccctagctactcaggaggttgagactggaggattgcttgattccaagaggtcaagactgcagtgaattagccagatgtggtggcacatgcctgtaattccagctacttagggggctgaggcaggagactcgcttgaacacgggagatggaggttgcagtgagccaagattgcgcccttgcactccagcctgggcaaggagagcgaaactccatctcaaaaaaaaaaaaaagttaaaggctgcagtgagctgtgttcacaccactgcactctagcctaagagacagagcaagaccctatctcaaaaaaaaatttttttttaataaataatttttaaaacttagctgggtgctgtggcacatgcctggtgtcccagccactcggcaaactgaggcaggaggatcctctgagctcaggaggtcgaggctgcagtaagctgattacacgactgcactccagcctgagtgacagagaggaccctgtctcattgaaaaaaaaaaaaaaaaaagagctgggcatggtggctcatgcctgtaatcccagcactttgggaggccaaggcgggcagatcacttgagcccagaagttcaagatgagcctggccaatatggcaaaaacccatctctactaaaaatactcccccaaaattaatggcgtggtggcgggtgcctgtagtcccagctactcaagaggctgaggcaggagaatcacttgaacccaggaggtggaggttgcagtaagctgaggttgcaccactgcactccagcctgggtgacagagcaagaccctatctttacaaacaaaacaaaacaaaacagaaggactctgcaaaaggagttttaagtatgggaacgtccagttgaggtctgagttttggaaaggtccctattggcagtggattgtaggaggtgacagtggagtcagaaggatcctagaggtggctgggacggggcagtactgcagagtggacgcagagttcctgacacctgccactaccagatgtccccaacccaaggcacagcatgctacacggaagtgagaatgaatacctggaaatacacacagccatgtggacgaatctcagacataatgtcgagtagaagaagccggagacaagagagcacaggctgtgggattccattcacagaaagttcaagaacaggcagagcggatctgtggtgtgctcagttgggaaattggttactatgaaagaataactcagagacattgttagttactttgaatgcaaatcacaggagggagctcagtcagtagactattgccaaagaacaaaggctggttggatgcggtggctcacgcctgtaatctcagcactgtgggaagccaaggtgggaggatcacttgagcctaggaattcaagaccagcctgggcaacatagcaaaaccctgtctctacacagaataaacaaaattatctgggcatggtggtatgtgcctgtggtcccagccacttgggaggctgaagtgggaggattgtttgagcccaggatttcggggctgcagtgagccgtggttgcaccacagcactccagcccaggtgacagagcaagacctgtctctaagaaaaaaagagtgaatgcagaaaccagatttataagacagaggggagaaagaggagagaaaaaagacccctaaagagtctgagaacaggctgggctcggtggctcatgcctgtaatcccagcagtttgggaggccgatgtgggtggctcacctgaggtcaggagttcgagaccagcctggccaacatagtgaaaccccgtctcttctaaaaatacaaaaaattagccaggcatggtgccgggcgcctgtaatcccagttactcgggaggctgaggcaggagaattgcttgaacccaggaggcaaaagttgcagtcagccaagattgcaccattgcactccagcctgggtgacagcgagactctgtctcaaaaaaaaaaaaaaaaaaaaagattctgagaacaaagaatcttgtatgcacagttttagggcaaattcattggctggcaaggagtacctaggttcatcttggcaactggtccttggagaggtcaacgtgaggaggggcatgaaagagaacaactttcattgtttaccgagtctctaggagacttttgagagtccattgtttttggtttttgttttttgagactgggtctcactctgtcacccaggctggagtccagtggcaagatctcagctccccacaacctctgcctcccgagttcaagcgattcttttgcctcagtctccttagtagctggaattacaggcatgtgccaccacgcctggctaatttttttgtatttttagtacagatgaggtttcaccatgctggccaggctggtctcaaactcctgacctcaggtgatcagcccgcctcagcctcccaaagtgctgggattacaggcatgagccactgcgccctgtcgctatttgtggaattgtaactgaacacaggttcagttgctcatcagttacagagtccaattaacaagagcgaggtctggtagaaagaaaatgactttattcatcaaaactagtcatggagaagtgaccggattcccatccgaagcaaccacttcaaatctaggggggaaagcaagggtttaaaaaggggaaacttggctgggggtggtggctcacgcctgtaatcctagcactttgggagactgaggcaggcggatcacatgaactcaggagattgagaccagcctgggcaacatggtgaaaccccgtctctaccaaaaatacaaaaattagccaggcgtgttggctcatgcttgaatccaggaggcagaggttgcagtgagccaagatcacaccattgcactccagcctgggtgacagagcaagactcttgtctaaaaaaaaaaaaaaaaaaaaaagaagtctgagaacaaagaatcttgtacgcacagtttttggggcaaattttcaggagactgagacacaagaatcatttgaaccctgtaggcagaggttgcggtgagccgagatcctgctattgcactccagcctgggccacagagcaagactgtgtctcaaaaaaaaaaaaaaaagcattgaagttgagctgcctggttactggttacagaatgacagagtagattgttagatggatgtagggaggttttggaagttaccccaagtgattccagtgtgtgtccggggctgctagtgtacacgacgcccagagaaatgttgcagagggctgcaagcaccccagggcccagcggtgtacccggccgggagcttcatccccctgcaggagtggggggcccttgactaattcccatgcaggtgcactatggcctaatggtggctccgtgtgtgaccaggtgtaggaccaacggcctggcctagcccgcctgcccagcccagtactccattccctgccacctcaggtatcccgagtggacggcactgtggacacgcccccctgcctgcgcctgacccaccgcacctggggctcccagaacagcctggtggagatgcttttcctgcggctgagcctcccagtccagttccaccagcacttccgctgcactgcaggggccaccccgctggcacctcctggcctgcagccccccgccgaggacgaggcccgggcggcggaacccgaccctgactacgaaaacctgcgccgctcagctgggggctggagcgaggcagagaacggcaaagaagggactgcgaaggagggcgcccccgggggcaccccgcaggcggggggagaggcgcagcccgccagggcggagaatgagaaggatgccaccaccgagaagaacaagaagagagggtgagtcgaggggggcccagagtggggattgggggctgccttgggacccccaagtaggcaaccacagtaacctgagaaacccccattgtaccccaaagtagacccatatatgctaagtggagtaagaataccgagagattctatcatgtctccaatgaaccccattattttcctgggatgccctaatgtccccaagaatatataattgggtaccctagtatctatatggagaactctattatccttgagtacctggagggccccaaagggcttcgcccaatggaccttatcatccgtggacactaaaagggacttcagtatcttcctaggagagtttactgcacagtaaggtatcccagtgaatacccagtggtcttctaaatggggatcctttctgtgtcacaaatgtaccccccgaaatctaacttaaagggagattctgagaaggtactaaatctgctttttccctacaatggcagtggtttcctttttttctttctatctttttttttttgaggaggaatctctgtcgccaggctggaatgcaatggcgcaatctcagctcactgcaacctccacctcccgggttcaagcgattcttctgcctcagcctcctgagtagctgggattacaggcacgcgccaccatgcccagctaatttttgtatttttagtagagacggggttttgccatgttggccaggctggtctcaaactcctgacctcaggtgatccacccacctcagcctcccaaagtgctgggattatagacatgagctaccacgcccggctccttttttttttttttttttttttttttttgagatggagtcttgctctgttgcccagtctggagtgcaatggcacgatcttggctctctgcaatctccgcctcctgggttcaagcaattctcctgcctcagcctcttgagtatctgggactacaggtgtgtgccaccacacccggctaatttttgtatttttggtagagacagggtttcaccatgttggccaggctggtcttgaactcctgacctcaggtgatccgtacgatggcagaggttttcaatgggattgaaaacccattgtgtctcttggtggatgtttggaaatgatggagtctttgtggtcattacagtttgggaggggctgctgctgctgggcgggggccccagggttccgcctgccttgcagtgtacaaaacagtgccgcacaatgaagaattgtccttttccaagtgcatttagcacctatacgagaaatgcatgtgggaaatgctgacttagggggacccccatataacccagtggggacctccatattcccagaaggcgcctttaatttgggtaactcagcatccacaagcgcagagcatagcacttctagaatggattagtctggggtaggtgggaatccagccctctagaggcaagacctggggtattagaagcagggtgtatccaagctggatgtgggggcatgaatattgcggtgggagggctgggcttgaaagctggctctcatggcgcctctcctcccactaccagcttcttattcaaggccaagaaggtcgccatgatgacccagccaccggccacccccacgctgccccgactccctcacgacgtggtgcctgcagacaaccgcgatgaccccgagatcatcctcaacaccaccacggtgtggaccagtaaccctcaattttggggtccccccgcatagcataggcactcctgaatttccaagtttagtgtgacagtccccagtagctgcccaccttacactggggactccccaatatacactagaaactcataaaatatggcacacacagatttaatcctttgaacccctaaatccatatagctatggcccacaaacggcagggagtacagtagaggtgtacagcacactgatataactcctggggatccccaaagccatgatataagccaatatagactagggaccccaacatttgggctcactcatataaacacaataccctcaatgtaatacctactctaatatattactgggaacaaaaattcataattgtcttaatatagttttgggatttccccaaatccaaaatatttcatagacagacagcctagtgcagtgctccccaactattttggcaccagggatcaattttgtggaagacagtttttccgtggaccacggatgcggggaaggatggtttcaggatgaaatgttccatctcggatcatcaggcatagattccttttttttttctttttatttttgagatggagtcttgctctgttgcccagtctggagtgcagtggtgtgatcttggctcactgaaacctctgcctcctgggttcaaacgattctcctgcctcagcctcctgagcagctgggataacaggctcctgccaccatgcccagctaatttttgttttctgttttttgtttttttgagatggagtctcagcctgtcgcccaggctggagtgcagtggcgcgatctcggctcactgcaacctctgcctcccgggttcaagtgattcttctgcctcagcctcccaagtagctgggactatgggcacacgccaccatgcccggctaatttttgtgtttttagtagaaacggggtttcaccatattggccaggctggtctcaaactcctgacctcgtggtctacccgcctcggtctcgcaaagtgctgggattacaggcatgagccaccgtgcctggcctaatttttgtatttttggtagaaacggggtttcaccatgttggccaggttggtctcaaatccccgacctcaaatgatcctactgcctcagactcccaaagtactgggattacaggtgtgagccaccgcgttcggctgtagattcttacaaggagtactcaccctaggtggcttggatcccagtaccagcccacagcctggggttggggatccctggcctcgagattagatcatgggccgactgggtgccacttgggcaaaagtcatttcaccactctatgccttctctcctatggaggtgctatggttttccatcagtagaatgggggtaaaaattatacctacctgatatggaggatgaagtgagttaatctgtgtagaccttagaacaggcctggcatgatggctcacacccgtagtcccagaacgttgggaggccaaggtgagaggatcacttcaatccaggaatttgaggctgcaggctacgatggtgcctctgcactccagcctggatgacagagggagactgcaactcaaaaaaaataaaaataaaaaaataaggaaagaaaaaaaagaagaagaagaaggaaagaaaaaaaagaccttagcacagtcagtgctatttgtgagcaattatttaattattttttgtatttttttattttgagatggagtctcactctgtcacccaggctggagtgcagtggcacgatctcggctcactgcaacctctgcctcccaggttcaagcgattctcctgcctcagcctcccgagtacctgggactacaggcgcccaccaccatgcccggctaatttttgtacttttagtagagacagagtttcaccatattggtcaggctggtctcaaactcctgacctcaggtgatccaccttcctcagcttcccaaagtgctgggattacaggcgtgagccaccatgcctggcctgcaattatttatttgtcagtctactgtaacctgggaggaacccaaatatggcactgtcacacaatattcccaagggactcctaaatctagaattgcacaaattgacacagaaacagacataaccagggggtgggggactcagatccaacaacttcctgttaaactcccagaggacccaacagtccagggaaaccaatttcgagtcccagggagcccgagtccctgacttccagactgaccactagttcccctccttgtgtcaccagtactattactccgtgagggtctttgctggacaggagcccagctgcgtgtgggcgggctgggtcacccctgactaccatcagcacgacatgagcttcgacctcagcaaggtccgggtcgtgacggtgaccatgggggatgaacaaggcaacgtccacagcaggtgccggggctggggggaggtgggaggtgcagggtggggagggcaggaggcagtcagagctcccgacaccagctctgtggctgcctggttgtgggacctaggaactttctggagcgggaggattctctggggcactgggcacccagctcggaagcttccctcctcctctttttcctcctctcttcctgccctggtatttttcttctcctcctcctcctctttatgcatttctcctattccattttctccttttccttctcatcctgtttcatctcacccttctccttctctgtcatctcattctctctcctcctgcttcccttgctttccctcctttcagacccccacccccatcctgactccccactgcgccagctgctaggaatcccagctccgaagagctcagtgtccggggcgaggggtttcagctctcaggtctgcaggcggtgggtgtttggggatgggactctgaggttgtgtgtttccgggagcttggggaagggggtgtccagggtccagagctactcacatgaggagtgcagtgaccgcttctgtctcctgcagcctcaagtgtagcaactgctacatggtgtggggcggagactttgtgagtcccgggcagcagggccggatcagccacacggaccttgtcattgggtgcctggtggacttggccactggcttaatgacctttacagccaatggcaaagagagcaacacctttttccaggtgagtccaggccacagcaatttagcgagagcatcatgtcccagcatcccaggacagctcttatagatgtcccctgaggccagacctcagagatggaacaaaaacagctcctaggctgtcctcaagaggtcgctgggagaccaccttgttgaaacttccatgaaactaaggcccagactggaggagatacagaatctcactctgttgcccagactggagtgcaatgggacgatcttggctcactgcaaccttcgcctcctgggttagagggattctcctgcctcagcctcctgagtagctgggattacaggcgagcaccacaacagccggctaagttttatgtttttagtagagacgaggtttcactgtgttggccaggctggtctcaaattcctgacctcaagtggtccacccacctcggcctcccaaagtgctgggattacaggcgtgagccaccacacccagccagagtccagccttgaccttggaaagaggtttctgttccctcttgagctgggtgacaccagtcaccaacttctctccaaccagggaacacgctaggatgggccagaatcctaaggtggccttttccttttcaacattttattctgaaaaatttcaatcatacagcaaaattgaaggagctatgtagataacaccctgtacccaccacctggaatctactatcaatgttgtagatattggctttatcacatattcacctacctgtccattaatctaaggtgggtttgtacaactttattttaattttttggcatccattgttggttatgaaattttattgcattttattttctttattttgagacagggcctcactctgtcccccaggctggagtgcagtggtgtgatcacagctgactgcagcctcaacttcccaggctcaagcaatccttctgtctcagcttcctaagtagctgggactataggcatgcaccaccttgactagctgattttttgtgtgtattgtttgtagagatgggttttcctcatattgtccaggctggtctctcgcttctgggctcaagcgatctccccaccttggcctcccaaaatgctgggattacaggcttgagtcactgtgcctggcttattttttatttttattttttgagacagggtttcgctctgttacccaggctggagtgccatggtgagatcacagctcactgcagccacaaccttcctggactcaagcgatcctcccacttcagcctcttgaatagttgagaacacaggcacgtgccaccatgcccagctaattttttttgtatttattgtgcagacggggtctcactatgttgcccaggctggtctcaaactcctggtctcaagcaatccttctgcctcagcctcccaaagtgctgggattgcaggcgtgagccactgctcctggctaaagctttatgttaaatggagaattaaaaacgtatacaagaatggaatagtataatgaactgccatgcccctgtcacacagcttcaactgtcacccactcacagccaatcttgtttcatcttttttgtctgtttgttttttgagagagggtctccctctgtcacccaggctggagtgcagtggcgcaatctcgactcattgcaacctctgcctcccaggttcaagtgatcctcccacctcagcctcctgagtagctgggactacaggtatgcaccaccatgcctggctaattttttttagttttagtggagacaggatcttgctatgttgcccaggctggtctcaaactcttgggctcaagcaatcctcctgcctcagcctcccaaagtgatgggatgacaggtataagccactgcgcctggcttgtttcatctttttatatctacttcccttccacacccactggataattttgaaggaaattgcagacatcagatagtttcctctgttttcagtgtgtagctttaaaagataaggatgatcttaaagagcataaccacaataccactatcacctaaaagaaaaaaaaacaatagtttctaaatatcatcaaatatccagtttgtgttcagatttctctggttgtccccaaaatgtcattttaccatttctttgtttgaatcagaatctaagtagggtcatatattttattttatttattatttatttttattttattttttgagacaatgtctcactctgtcacccagtctggagtgcagtggcatggtcttggctcactgcaaccttcgcctcccgggctcaagcctcctaagtatgtgagattacaggtgtgcgccaccacacccagctaatttttgtatttttagtagagacggggtctggctatattgcccagcctggtcttgaactcctgggctcaagtgaccctcctgccttggcctcccaaagtgctgggattacagtgtgaggcagcatgctcaaccttatttatttaattatttattttaatttattaagacagagtcttgctctgtcacccaggctggtgcgcagtggtgccaaccgtactcaaccttatttatttatttattttaatttattaagacagggtctcattctgtcacccaggctggtgcacagtggtgcaatcttggcttactgcagcctcaacctcctgggatcaaacgatcctcccacctcagcctcccaagtggctgggaccacagacacgcactaccacacctggctaatttttgtattttttgtagagacggtgttttgccatgttgcccaggccagtcttgaactcctgacctcaaactattcgcccacctccacctcccatgtaatcccagaatataaaacgtgctgggattacaggtgtgcaccaccacgctcgaccagggtcatatattttaggtggttgctctgtaccttgagtttcatttcatatgtagatttccccctccattccttcttctttcccaaccccccagaaatgtatttgttgaaggaaccaggctatttgtcctgtggcactttgctcctcaaagtgtggtccctggaccaaccagcaggagagctgcaggatctttagctgggtctagtcatgggcacctgcagttccagctaccctggaggctgaggcaggaggatcacctgagtctgggaggcagaggttgtagtgagctatgatagcgccactgcactccagcctgggtggcagagcgagacactgcttctttttaaaaaagttaaaatgggccgggcgtggtggctcacacctgtaatcccagcactttgggaggccgagttgggcagatcacctaaggtcaggagttcgagaccagcctgaccaacatggtgaaaccccatctctactaaaaatacaaaaattagcctggcgtggtgacgggcgcctgtaatcccagctacttgggaggctgagacaggagaatcgcttgaacgtgggaggtggagtttgcagtgagccgagatgatgccactgcactctctagcctggatgacagagtgagacgtcatctcaaaaaaataaataaacaaaattaaataaacccagagtctcagaccccttcccatgcctgccaaatcagaatctgtattttgacaggatcccaggggcttcctgtgtatattaaatctggagagggctggcctggtttcccatagcctggatctggctggtgcattcctgtggtggctttttaacattttcctttgtcccccatatttcctgtaaactgggagttgggtcccagggtgcaattagatcaggtttggtgtgggcgggactgcttcagagacaatgttgtttgtggaggcagaggctggctggatgggctccactgggaagacgggagaggggcaagacagtctgaggacacttcctggaattttttgttttgagatagggtcttgttctgtcacccaggctgaagtgcggtggtgcaatcatggctcactgcagcctcgacctcccaggatcaagcgattctctcatcttagcctcctgagtagctgcaactacagatatggaccgccatgcctcgctaattttttatgttttgtagagatggggtctcactacgttgcccaggctgctcttgaactcttaggctcaggtgaccctcccacttcagcctcccaaagttctaggattacaggtgtgagccatcacactctctgggttttgaatgagtatgcttgggagagaaatgcgaagggcattcccagtgcggggtgtgatgtgtgcagagacagatgacaggttgctctgggaaagttggaggaggttggcctggctggatcagaggtgggacagtctaagggtgacctctgagccattttggagcctctaacgcccagatgaggacctacaaattggccccagagtttgaggtccagagtcaaccctccctccagcccacccgtttgctcacctcgtcctcttctcctctgccaggtggaacccaacactaagctatttcctgccgtcttcgtcctgcccacccaccagaacgtcatccagtttgagctggggaagcagaaggtacaagtgcagtgatgggggcactaatggggccaggctgaggcaggagatgtggggaggccaggcgggcagagccactgaaggggagggggcaatccaagaggtctccctggaagtggtgtggtgggacagagggggctggccatcttgacccatgtgtgtctctctgccctcagaacatcatgccgttgtcagccgccatgttccaaagcgagcgcaagaacccggccccgcagtgcccaccgcggctggagatgcagatgctgatgccagtgtcctggagccgcatgcccaaccacttcctgcaggtggagacgaggcgtgccggcgagcggctgggctgggccgtgcagtgccaggagccgctgaccatgatggcgctgcacatccccgaggagaaccggtcagggccagcccagctatgcaggggtgggcaggtgttgcaagccctctggggtctgggtcccactcagtgcccctcctcaacacaaccccgggattccagactacaccccaggaatctccagacctacctcaggggactcgggctcagctcagacatccccagattatgtcccagggggattcagactcaacgcaggaggctctacaccatcccagtggaccgcaggcccaccctaagggaacccagacaataccccaaggacccagacccactccacagggccccaaacccatctcagggagccagacccacatcaacaccccagggggccccaagtacaccccaggatccctggacatgattcagggaggcttggatgcaccctagagtctcttgggcatatgcagggaggctttaagaagaatcccgtggatatttcaaacccaccccaggggacccagacacacctagggccacagatgcgttcacatggatggcagggttactcttaagaactctgaacgtggccaggcacagtgcctcacacctgtaatcccagcacgttgggaggctgaggcaggcaggtcacctgaggtcaggagtctctactaaaaatacaaaaattagccagttgtggtggtgtgcacccatcgtcccagctactcgggaggctgaggcatgagaattgcttaaacccaggaggcggaggttgcattgagctaggatcacgccactgcactccagcctgggcaacagagcaagatgccatctcaaaaaatagaattctgaacgtgggaggaatcccagactcacccaggaggcttctgacatgcctctttctttctttccttccttccttcctccctccttccctctctccttcccttccttccttccttcccctctccctccctccctcccttccttccttcctctctccctccctcacttccttcctttattcattcatccattcaacaaatagctttgggtccctcctatgtgctaggtagtattccaggctggagacaccaagcccctgtgaagtgacattctagtaatgcttgtacataactcaggatgctcggacatgcccaaagggacccagggtcatccccagggccccagacacacccgtttattaatttattcattcaacaaatatttatgggtacagtggctcatgtttgtaatctaagcacttcaggaggctgaggaggagggagggttgcttgaggccaggggtttgaaaccaccaggaagcacagtgagaacccgtctccacattttttttttctttttaattagcttggcttggtggcacacacatgtagtctcagctacttgggaggctgaggcaggaggattgcttaagcccaggagttcaaggctgcagagctaggatcgcaccactgcactctagcctgggcaacagagcaagaccccatcactaaacaacaacaacaacaaatgctaagcactttactatgtgctaggtgtggttttaggtgctgggaatataacaaacaaaagcagaaacaaaacaggcagaaatgtcctgcccttggaatttacattctaatggcactcaaacacaactagtatactcagacctgccagagggggacccagtctgggggcccaaacacatcttggaaacatcagatgttctacatggactctcagactcttacgaagtcccagaccatcccagggaccccagaggtatcccaggggcccccagatcccttagggacttccagaaccattgaaagactcctagacccagctccactgccctcacagaaccctaagctaggaggccactggaactccctgctgcagccttcgacactcgtctaagcatctctgcctttctggggtctgtgcctctgtctcccatcttctcccaggatgggtgaattgatagatggaatggtaggggtttgaaggaaagacgaatgaataaatgggtggatagtgatgaaggaaatggaggaagagatggtggcttgactgatgcaggaggctcattcatctgtccctgtctgtttcccacctctgctgcaggtgcatggacatcctggagctgtcggagcgcctggacctgcagcgcttccactcgcacaccctgcgcctctaccgcgctgtgtgcgccctgggcaacaatcgcgtggcgcacgctctgtgcagccacgtagaccaagctcagctgctgcacgccctggaggacgcgcacctgccaggcccactgcgcgcaggctactatgacctcctcatcagcatccacctcgaaagtgcctgccgcagccgccgctccatgctctctgaatacatcgtgcccctcacgcctgagacccgcgccatcacgctcttccctcctggaaggagcacagaaaatggtcacccccggcatggcctgccgggagttggagtcaccacttcgctgaggcccccgcatcatttctcgcccccctgtttcgtggccgctctgccagctgctggggcagcagaggccccggcccgcctcagccctgccatcccgctggaggccctgcgggacaaggcactgaggatgctgggggaggcggtgcgcgacggtgggcagcacgctcgcgaccccgtcgggggctccgtggagttccagtttgtgcctgtgctcaagctcgtgtccaccctgctggtaatggcttcctcctgctttcctctgtcccattcttctcccacattcccaaaactccagagatacatgcatcaatcctcctctatttatgcatccaaccacccattcattccctcctctatacatccatccacctttctttttattattattattttttcgagacggagtctcactgtcgcccaggctggagtgcagtggcgcaatctcagctcactgcaacctccgcctcccaggttcaagcaattctcctgcctcagccccccgagtagcggggactacaggcatgtgccaccacgccccgctaatatttgtattttcagtagagactgctttcaccatgttggccaggctggtctcaaactcctgacctcctgatctgcccaccttggcctcccaaagtgctgggattacaggcgtgagccaccgcgtccggcctccatccacctttctatgtatcctcccaccatctccctatctttcattcacctttccctccatctgctcacctgtcatctctttatgtttattcatctcttctttcttcctattcatctatccaaccaaccatcattcatccatccatcaatccatcagtcctccaccagcctttccatccacccattcatcctatccattcatgtgtatagatcatctttccatcaacaagatctttccatcaacatctttccatctgcctttctatccttttgttctccacccactccattcattcattcatgtacccatctatccaagtttcaatctatttgcccatccatcttttcattcattcatacagcagtccatctaccattccatctgttcatctatccacctacccatttatgtattaatctatctttccttccgtaggtccaataatcatctcctcccacctatgcgtccatccatacctacatccacagatccatccgttcctccagttcccacctacccttcatccatccatccatctctccattcatatgtacgtacacccatccacctacccacaaatccatttagccatccacacccatccatctacccgttccctatccttctctccatcccttgtatcatgtacccttttattcgtagacccatctaactattcatttatatatccatctttttggttttgtttgtgtgtttgtttgttttgagacaaagtcttgctctgtcacccaggctgaagagtgcagtggagcaatctcaaatcactgcaacctccgcttcccatgttcaagagattcttctgcctcagcctcccaagtagatgggattacaggtgcccgccaccatgcccggctaatttttgtatttttaatagagatggggtttcaccatgttgaccaggctggtcttgaactcctgactttgtgatctgcccacctcgtcctcccaaagtgctggaactataggcgtgagccaccgtgtccaggcaagacagggtctcgctctgtcacccaggctggagtgcaatggcacaataatggctcactgtagcctcaacctcctgggcttcagcaatccttctgcctcagcctcctgaatagctgggactacaggtgtgcactaccatgcccaggtaagttttaaattttttgtagaggtggagtctcgctattttgcccaagctggtcttgaactcctgggctcaagcaattctcccaccttggcctcccagtgttaggattacaggcatgagacgctctgctcaacctaattttgtttttatttattatttttaatttaattttattttgtaagagacagggtaatgcccaggctagaatgcagtggtatgattgtagcccactgcagtcttaaactcctgggttcaagtggtcatcttgcctcagcctcccgaagtactgtgattacaggtgtgagccaccacacctggccccaacttttcatacacaaacctatccagccatgtggccaaccatccccccaccctcatggctattcactaatttatctatttatccacatattcatttacttcctcatgcatctatcaacccatccatcacctactcacctacctatacatcatttatccttctctcatccatccacccatcatctcttcctccatcatttccttcatctctccatcatcatccacttattcatctttccttcaaacctctaccattccgactcgggattcatccagccagccatccaatcctccctccattcatccatctctctctctcccctgcactcttcttccctttcgtctactccctctttacttccatatgttagcatcttttaaactttaatttattttgtttttgagacagactctccgtctgtcatgcaggctggagtgcagtggcataatatcagctccctgcaacctctgcctcccagattcaagtgattctcttgcctcagcctcctgagtagctgggaatacaggcgtgcaccaccacacccagctaatttttttttgtatttttgtagagacggggtttcaccatgttggccaggctggtctcgaactcctggcctcaagtgatctgcccgccttggtctcccaaagtgctgggattacaggtgtgagcctcgcctcatgtgttagcatcttcattatgttgactgagagctggtgtatgctgggagctatgcaggcgtagggtgtgtcctgggccagaggacacagcacatgcttaggcttgggagaaaggacactcgcctgtgatgggagaggcactcatatttgggtctgtggtctgggctgtgtgggtgggacacagggtgtggacctgggtggatcttaaggagggtggatggcaaggcgggggatgccattcctgctgtgggaggaatcggatcagccaatgcaggaatgattggcatgtgcatgaggggcaggtctggagaatgaggccagggcctgatgatggaggccttgcaggccacagtgaagaaccgagactttgtcctgtaggtgatgggcatctttggcgatgaggatgtgaaacagatcttgaagatgattgagcctgaggtcttcactgaggaagaagaggaggaggacgaggaggaagagggtgaagaggaagatgaggaggagaaggaggaggatgaggaggaaacagcacaggaaaaggaagatgaggaaaaagaggaagaggaggcagcagaaggggagaaagaagaaggcttggaggaagggctgctccagatgaagttgccagagtctgtgaagttacaggtgggctgctgcttcctgcttttcggcctctgtccatctgggctgggagacacagggtaggtgggatgtgagtctggacttcgtcctcaggcagtggggagctgtggaaatgcatatggcagtgagcaatgccaacttggaaagatctctgttttccatggagatgagaccatggagaaggcagtcttttttgtttgttttttgcgacagaattttgctctgtcacccaggctggaatacagtggtgcgatctcggctcactgtaacctccgcctcccgggttcaagcaattctcctgcctcagcctcctgagtagctgggatcacaggcatgtgccaccacgcccagctaattttttgtatttttagtagagatggggtttcgccatgttggccaggctggtcttgaactcctgacttcaggtgatccacccacctcggcctcccaaaatgctgggattacaggcatgagccaccatgcttgaggaaggcaggcttaaggttccaggcgggaaatgattttggctggacctgggcagggccatggagaggggagaggaagcaagagaagtttcaaggaagtcctgatggtctcacctccatctctcctcccacacggctgtccttccacagatgtgccacctgctggagtatttctgtgaccaagagctgcagcaccgtgtggagtccctggcagcctttgcggagcgctatgtggacaagctccaggccaaccagcggagccgctatggcctcctcataaaagccttcagcatgaccgcagcagagactgcaagacgtacccgcgagttccgctccccaccccaggaacaggtcatctgacccctgacgctggccacttttactgtctaaaccccaacctcaacatctcctgactctgatcactgaggaccctcaacctctaaacccgtgcttgacccctgaccctagtgatacatttatctcctactctctgaatcaacctgacctctgagtcacctcagactgatgctgactcttttcaaacctctggccctagtctcccaaatagtcttcattaactcacacttcgactcatgaccttagacatggactaacaattgcatcttctatctctgatctcagagttcctgctttgggatctcagaccctcattctaatctttgaccttcccctagatcaatatgctattgcaattcaaagatggtacagatgaggaagactgtcctctccctgaagagattcgacaggatttgcttgactttcatcaagacctgctggcacactgtggtaaggagtggggatcagagagtcctccccatgctaactttctctcgagacctctccagaagtttccctaagatttcctgacaaccctctacagtatcggtgctatgtaactattggttgaatgaatgaatgagtgagtgaatgaatgtgttagtgaacagttagacaatgcgtgtttatatgggtatttgggtggatggctataagccagataaatgaatgggtatgtgaattgatggatagaagaagtgggtaaaaaatggctggctggatagatggaaggatgaagagaaggatggatggatggttgagaactgggtggagagatggctggctgggtggaaggacagatggatgacctccatagtttctgatgagaagtctgctgatagtcttactgagattcccttgcacatgatgaattatttttccttggctgacttttaagattttctctttgtctttgcctttcaacaatttagtatgacgtgtctaggtgtagagctctttgaatttatcctgttgaaagtttgttgagtttcttggatatatacttactttttatcaaagttggaatatttttgacaattatttattcaaatacttttctgcccctttcctcttcctctgggactctcattatgcatatattggtacacttgatggcatcccacaggtctctgaggatttctttcattttgctttttttttttttttgagacggtctcactctgtcacccagcaggagtgcaggggcacaatcttagctcactgcatcctctgcctcctgggctcaagccatcctcctacctcagcctccaaagtagctgggagaacaggtgtgtgccaccacgcctggctaattttttaatttttttatagagtcggggttttgccatattgcccaggctggtcttgaactcctgggctcaagcaatttgcatgcctgggcctcccaaagtgctggattacaggtgtgagccactgcacctggcccatttttcttcattcttttacttttctgttcttcaggctagacaatctctatgtcctatcttcaagttcactgactgtttctcctatcagctcaaatatgctgttgaacccccctaataattttttatttcagttattttatttttcaactccagaatttctatattttaacagtctgcctttttattagtattcactactggataagtcactattatgatatttccttttaattcttcagacatggtttcctttagttctttgaacatatttgcaaaattgatttaaaagataaatgtttgatagaatgaataaatgaacaaatacatgaacatacaaagaaataaatgaggccaggggtggtggctcatgcctgcaatcccggcattttgggaggctgaggtgggtggattgcttgagctcaggagttcaaaaccagcctgggcaacatggcaagacccccatctctacagaaaaagatacaaaattaacagggcatggtggcatacacctgtagtcccagctactcaggaggctgaggtaggaggatggcttgagcctaggaggcagaggttgcagtgagttgacatcatgctactgctctccactgcaacagaacaagacactgtctcaaaaaaaaaaaaaaaaaggaaatgaaaaactccatgcatgcatgcacatatgcacaaataaatgagtgtgtaagcaggtgaataagcaaactaatgaatgacatttcccgccttcttgaccacttccaggaattcagctagatggagaggaggaggaaccagaggaagagaccaccctgggcagccgcctcatgagcctgttggagaaagtgcggctggtgaagaagaaggaagagaaacctgaggaggagcggtcagcagaggagagcaaaccccgtgaggactggggtcactggggagagggcaggggtggggtgggtagccccatgcctgcggagcctctgggtcccaaagagggcatgaggacagatgcaagggaggggtagataggcaggagtgagaggggaagagtggcgggcaaagtggaagcaggcgtggtggctcacgcctgtaatcccagcactttgggaggctgaggcgggtggatcacttgaggtcaggatttggagaccagcccggccaacatggtgaaacccccttctccactaaaaatacaaaaattagctgggtgtggcggtgcatgcctgtaatcccagctacttggagactgaggcacgagaattgcttgaatgcaggaggtgggggttgcagtgagcccagattgcgccactgcactccagcctgggtgacagagcgagactctgtctcaaaaaaaaaacaaaaacaaagatgcatgctggaggtttgcctccagagatgggggctgtagaacgtgtgtgttggaccagggtgacacagcctaccagcttagtggcaaacctctaactaagggatggcggtaaccctgaaccactgtggcttccgtggccttggggcttctcttttctttcttgatgagaggattaccatgctgagggattagacaagcagctatcattaatgttgggccaatgtgttattttgcaaactgtatattagccacatctaacaaggacagatttcctgacgttggtacaggttttatcccacaacattcaggaaacttttatggggccaactatgggccaggcactgttaccagggctgggaaatacagccgaggggggaaagtcaaagcccctgcccacgagtttagattttttctttttctttttcgtttttttttttttttttgaggcagggtctcactgcgtcgcccaggctagatagagtgcagtggcgcgatcttggctcactgcaacctccgcctcctgggttcaagcgattctcctgcttcagcctccagagtagctgggactacaggcgcgcagcaccatgcctggctaatttttgtatttttagtagagacggggcttcaccatgttggccaggctggtctcaaactcctgacctcaggtgatccacccgcctcagcctcccaaagtgcagggattacggctgtgagccaccgcacccagccaaatccacagtatttttatagaacaagtgggattgtgacatgtgccttcaaaggtgcatggcgaagtgcttctggtcggctctggtatcttgcagttgtacagtttattattcctattgaaatttttaggaagcccttgtgggctggatattagggtgaacagaacagagagattcttgggcgaatagaaaaaagtttgccaggctgggcacagtggctcacacctataaccctagccctttgggaggccacagtaggaggatcacttgagcccgggagttcgaggctgaagtgagctgtgatagccccacagcaccctagcctgggcaacagagcaagacactgtctctaaaagaaaaaaaggaaaacaatctgctagaatctgcctgctcccagcaggtggagggcgcaggtggtagtaactgggaaaacttctggaacagggggccccttccacattgttctggtccaaggccccatgtgccgacctgccctgcatggtgctccaagccttgcattgtctccttcccagggtccctgcaggagctggtgtcccacatggtggtgcgctgggcccaagaggacttcgtgcagagccccgagctggtgcgggccatgttcagcctcctgcaccggcagtacgacgggctgggtgagctgctgcgtgccctgccgcgggcgtacaccatctcaccgtcctccgtggaagacaccatgagcctgctcgagtgcctcggccagatccgctcgctgctcatcgtgcagatgggcccccaggaggagaacctcatgatccagagcatcgggtgagacaccgcccttcccccttactttgcatatccccttgggtaatgaataccctcaggatacaataacattcccttccccaacttctggcccatcctctgggtgatctcagtctctcgatggctagctcacctcctgggtaatgtctccttcccttacctctccgccctcagtggtagcagctccgcttctgtgtgactctcagcaggacattccccacccccccctttttttttttttttgtgagactgagtctcactctgtcacccaggctggagtgcaatggcgcaatctcagctcactgcaacctccgcctcccaggttcaagcaattctcctgtctcagcctcccaagtagctgggattacaggcacgcaccaccataccaggctaattttttatatttagtagagacagggtttcaccatgttgatcagactagtctcgaactcctaacctcaggtgatccacccgcctcggcctcccaaagtgctgggattagagacgtgagccaccacacccagctgaggtttaccctttttgagcttcagtttcctcatctgtaaaaccggggagagccaagcctactctgaagggttgtgctgtggcttcagtgagctcatgcgaataataataattatggtagcagtattgagcactcattgtcaaataaatctcattcacacagtaaacatttattaagcacctacttcgtgccaggcatttctaggtgtttttgagacagggcctcactctgttgcccaggctagagtgcagtggcccaatcacagctcactgcagcctcaacttcctgggctcaagcgatcctcctgcctcagtctcctgagtagctgggactacagacacacaccaccatacccagctaatttgtaaatttttttgtagaggtagggtcttgctatgttgcccaggctggtcttggactcctgggctcaagtgatcctcctgccttggcctcccaaagggctggaattacaaggcaaaagccaccatgctgggacaacatttgacaaagggcaacatggcaaagatctctgccctagaggagcctgccttgggtgcacgcctcagtctccttatgagggaaacagggacccttcctcccacagtggctgtaggaattttttttttttattttttgagatggagtcttgctctgttgccaagcctggagtgcgcaatgtctgctcactgcaacctccgcataccgggttcaagcgattctcccacctcagcctcctgcgtagctgggattacgggtatgcgccaccacgcctggctaatttttgtatttttagtagaaatggggtttcaccatgttggccaggctgatctcgatctcctgacctcaagtgatcctctagcttcggcctcccaaagtgctgggattacacgcatgagccaccgcacccggccagctgtaggaattgagtgagttcagatctgtaaaggcggtggtgctaggcacagagtgagagggtcaagaatgccaacgctgtcacagtggtggctatggccctctccggacctgggcccctggtgaccccgcacactctgcccgtgcacaggaacatcatgaacaacaaagtcttctaccaacacccgaacctgatgagggcgctgggcatgcacgagacggtcatggaggtcatggtcaacgtcctcgggggcggcgagtccaaggtgagggcccaggcaggtgctggggagctcaggggaggcagccacagagggcaggccctgaccaccctgcctgtcccaggagatccgcttccccaagatggtgacaagctgctgccgcttcctctgctatttctgccgaatcagccggcagaaccagcgctccatgtttgaccacctgagctacctgctggagaacagtggcatcggcctgggtgagaacccccgagcccaggggctgtcccccagaacccactcctggcaccccgtccaggcctgccccactttccaccagctcactcattcaacaaacactccctctcaactgtggttctggccctgtaatgagtaatgctggggacacaatagtgaccccaatagtgacagcccagagtggtcagagcttggatgagggaagtacagaccagaggaggcacctgatccaggctggaaaaagggtggtcagggagggcttcccagaggaggcgagacaagcaggagtgagatgttctccccacctctcgcccctgcaggcatgcagggctccacgcccctggacgtggctgctgcctccgtcattgacaacaatgagctggccttggcattgcaggagcaggacctggaaaaggtgtggagggcagggctgggccccaggcctaagggaggaaatcgggccgctacccggctgcttgggacacctgctgattccaaactcattctggggggcaattctggatggtccagtgcccaaccagaaggagactaatttgcagggagagaacggcacccagttgttcattcatgggatgcttcctggctgtgggccggtccgcactccacgcttcccgtctgggggcaggtccacagtctacgcttccgggatgggggcggatccgcactctaacttccaggctgggggcggatccgcagtctacacttccgggctgggggcggatccgcacgctacgcttccgggttgggggccgatccacagtctaggcttccagccaggtggccttggcacatttcttcgctctccgagcttccacttctgtgtacagtggtgaaatgcgtgggctccagacttcagcaactttgcttctgctcccctcgctccctggctgtgtggccttggataagtgacttagactctccagacccctgttgtctcatctgtacaatgaatgtagtcatagaaacgacttcatggagtcattctgaggattaaatgaattaatccagtaaagtgtttgtaaaggggcagtcagtaacgttagctgctgttatattatcattcaacaaatatgtagtgttagcttaccatatgcaaagcagtagcaatatgacagtcaaaaatccctgtctggccaggcaaagtggcttacatctataatcccagcactttgggaggccgaggcaggaggatcacttaagctcaggagtttaagaccagcctggacaatatagggacaccttgtctctacaaaaaatacaaaaagtaggtgggtgtagtggcacgtaactgtagtcccagctactcaggaggctaaggtgggaggatttgatagagcctgcgaggctgaggctgcagtgagctatggtcacaccactgcacttcacctcagggacagagcgagaccccttaaaaaaaaaagtggccagagaaagcctcattgagaaagtgacatttgtgtaaagctctgaaggaaggtgacaggtcaggtggtcatcatggggaagagcattctaggcagcgggaacagccagtgcaaaggccctgaggcaggagcaaacctcataagctggaggaacagcagaaagacagctgtggctggagcagaggtagtgagggtgagggcaggaggtgacaggtgggtcatgtggcatctcatcggtcacaacaagggctctggcttttaccctgagtgagaggaggccaggattctgagcagaggagggacgtgacctgactcaggtgttcacagggtccctctggctgtgtgtggggaacagattgaggggaaggcagaaggacagaaggacagggaggaggctcgtgttgtggtccaggtgggagacaagggtggacagaaccgctacaggaaaggggtctggatccaggcccaaagagaaggttcttggatctcatgtaagaaagaattcagggcaactccatagagtaaagtgaaagcaagtttattaggaaagtaaaggaataaaagaatggctaatccatagacagagcagccccaagggctgctggttgcccatttttatgttatttcttgatgatatgctgtttagcataacaaggggtggattattcatgcctcccctttctaaaccatgtagggtaactttctgatattgccatgacatttgtaaactgtcgtggcgctggtgggagtgcagcagtgaggatgaccagaggtcactctcgttgccatcttggttttggtgggttttggccggcttctttactgcagcctattttatcagcaaggactttatgacctgtatcttgtgccaaccttctatcttgttctgtgacttagaatgccttaaccatctgggaatgcagcccagtaggtctcaagctcctgttcaagatggagttgctgtagtttacaggcctctgacaggaccagggctaatgggccgagggatcagagctgaaccggactgaggagccgcagggcagggcagggcagggcagagggctgagccccaggaggaaggtggcatgggtctggtctctgactgagccccttctgcccccaggttgtgtcctacctggcaggctgtggcctccagagctgccccatgcttgtggccaaagggtacccagacattggctggaacccctgtggtggagagcgctacctggacttcctgcgctttgctgtcttcgtcaacggtgaggagggggtggcagtggcagagcgggaagtatggagtcactggtcacacacctccctcgagatgactgctcgcaccctgagccacagatggggtccaggcaggaatcccttccagcaggcctggggctggcaggggcctgtgttacccctggaggtgttgggtcctgtggctggcagtgttggatcctggggctggcgggagcctggtgttacccctagaggtgttgggtcctggggctggcaggggcctggtgttacctctggaggtgttgggtcctggagctggatgggacctgtgttacccctggaggtgttgggtcctggggctgcatggggaggtctctgatggtggctcatgagaccccctttccccatgcgggtggccaggcgagagcgtggaggagaacgccaatgtggtggtgcggctgctcatccggaagcctgagtgcttcggacccgccctgcggggtgagggtggctcagggctgctggctgccatcgaagaggccatccgcatctccgaggaccctgcgagggatggcccaggcatccgcagggaccggcggcgcgagcagtgagtctcccggccccctcctcaatagggcaacccgccctccctggcccctggctgcctccccaacccacccaccttccctgcagctttggtgaggaaccgcctgaagaaaaccgggtgcacctgggacacgccatcatgtccttctatgccgccttgatcgacctgctcggacgctgtgcaccagagatgcatgtgagaccctgagccagggcaggatgggaagggagggcaggcacagccgctttgaacgcctcatgcaggcactcggtgacacggagtgagctcccatatgtgggtggtcctggactagcaatgttggggacacaacagtgaccaagacagccccagggcctggtctcacagagctcccagtccaatgggggagacggacagtgacacccagagtggtcagggctgggatgggggagcacaggaagaggggtcggggctgggattgcagggcacacggagaggactcaggatggggatggggaacacagggagaggggtcaggatggggatggggtcacagggataggggtcggggccaggatgaggggtcgcagggagaggggtcaggatgaggttggggggaacaaggagagaggtcgggactggggtgggggggcacaggcagaggaacgagggctggaaactctagacagcctcctgagaaagaggcctgctctaccctcctgtgtggtaagggagggagcagagcagtcactgagtggggcaccagcgcctgatgagtgcccctctccctccctctactccccagctaatccaagccggcaagggtgaggccctgcggatccgcgccatcctccgctcccttgtgcccttggaggaccttgtgggcatcatcagcctcccactgcagattcccaccctgggcaaaggtgcagaggggatggaacttggcgaaggagtgatgctggggagggagcggctgggtccgcagggcatccccgaacccaccctccctgcctgcagatggggctctggtgcagccaaagatgtcagcatccttcgtgccggaccacaaggcgtccatggtgctcttcctggaccgtgtgtatggcatcgagaaccaggacttcttgctgcacgtgctggacgtggggttcctgcccgacatgagggcagccgcctcgctggacacggtgagcaaccctgcccagcctggccaccctccccacttccacagagggacaggagatgggtcacggtagagcagcagcagctgcttttgtttttcttgggattgtggacatatcataatccccaataccatcatcaagatagaaaatgaaaacgaagaaacactgaattccgatgaagggtgagtaggaatctccaagacctccagttataagaaatcatcatttgaggtcaggcgtggtgactcgcgcctgtaatcccagcactttggggagccgaggcgagcggatcacaaggtcaggagttcgagaccagcctgaccaacatggtgaaaccgcatctctactaaaagtacaaaaattagccagacgtggtggcgcacacttgtaatcccagctactcaggaggctgaggcaggagaatcacttgaaccggggaggcggaggttgcagtgagccgagatcgtgccgctgcactcccgcctggcaatggagcgagactccatctcaaaaaaaatattttgttcgcagtattggtttggtactgtgggcacacagaactctgtacaggaacagcaataacagaagggtgacagggcaaggaagatgagcactgagaagtgaccaccgatttggcaaagtcaaggtcactggaaatggggatgagcagtttcagcaggggacagaagccttccgagagggggtttaagagagcctggggctgtgcatggtggctcacccctgtaataactttgggaggccgaggcgggtgggttgcttgaagccaggattttgagaccagcctgggcaacatggagagatcctgtctctacaaaaaaaatttaaatattagctgggcatggtgctgcacacctgtagtcccctctactagagaggctgaggtgggagaatcacttgagggacagacattgaggctgcagtgaaccatgattacatctctgcattccagcctgggcgacagagcgagaccttatctcagaaaaaaaaaagaaaaataaattagccaggcatggaggtgcgtccctgtagtcctagctactagggaggctgaggcaggaggatcacttgagcccaggaattcgaggctgcagggagctatgattgcaccactgcactccagcctgggcgacagagacccctgtctctaacagatgaaaaagaatgtattacaggaagaaagatgagggttagagaggagataagcgtgcagaccattgatatttacagaagagccaaatctgtaatggggttcattaatctcatcgaccagttgtgtgtgtttgaaattttgcataatccaaagtagtaagtggtggggtgggggctgtgggcataggggtgtgggcatagggtgggaggagggtggtagagattgggaggagcaggttttgggggagtcatcagaagcttggatcctttggccacagtcgctcaagacaggtgccagagcagccccaggggtgtgcagcgggcctgatgtcctcaccctgcgccctaggccactttcagcaccaccgagatggcgctggcgctgaaccgctacctgtgcctggccgtgctgccgctcatcaccaagtgtgcgccgctctttgcgggcacagaacaccgcgccatcatggtggactctatgctgcataccgtgtaccgcctgtctcggggtcgttcgctcaccaaggcgcagcgtgacgtcatcgaggactgcctcatgtcgctctgcaggtggagcggggcaggcttcagggtggggcaggggcaggggcaggggcaggggcaggggcaggggcaggggcaggggcagggggaggagcaggggcaggggcagcagagcgggcctggacgggggattctacatcttgtgcattgtcccgcaggtacatccgcccgtcgatgctgcagcacctgttgcgccgcctggtgttcgacgtgcccatcctcaacgagttcgccaagatgccactcaaggtgagggcaagcgctctttagcatctcatttccaggccgcacccactggtttgctcttccctcctactgcggggctcatttgtgtcggcactgcccagcccaataaacctgcactagttagggcagcgtccccgtagaaatctcttagcatccttatttgcatactaggattcccagaacattcactttgcttcattgatgcctctagcgttccctaattagcatttaatttgcttaacagtgagccagcccccgcttcaattagcatatatttgcatggagcacaccactttccctaattagcatgtttatttgcatgcctggaccaccagacttccactattcaaatgagtgcatttatttgaataaacattatcacagctattctgaatatttgcacactgtctctcttattttttcatttgcatgctaatttgcataaagagatacccccaactcagatattttgactattttgcataatacatcgaaatcagctcctatttcaaatttgcattttagccaggcgcggtggctcacgcctgtaatcccagcactttgggaggccgaggtgggcagatcacttgaggtcaggagttcgagaccagcctggccaacatggcgaaaccccatctctactaaaactacaaaaataagccaggcatagtggagcacgcctgtaatcccagctactctggaggctgaggctggagaatttcttgaacctgggaggcggaggttgcagtgagccgagatcgtgccactgcactccagcctggtcaagagagtgagactccacctcaaaaaaaaaaaaaaaatttgcattttggatagtggaggccctcttcccaattaccatatatttgcatggggtgcagcctttgtttctacttggtatgttaatttacataagcacagattgctgcatccatatgcccatttactcactacatacccatggattaatattagcacgcttatttgtgtaaagcaataccagacacaaccagctctagtttaatgcccattttaactctaaattaagaatgctaaatttgcatactaagctgtctaggaccactcctcaataaacataccatttcttcccttattagcatatcatttgcataacccacacctccttcataatttaaaagcactggcatgcctgtgtctctctgggccttcgtctgcctgccattcgctggtgcccccctcatttgtgtgtccccctcttgttcccacccagctcctcaccaaccactatgagcgctgttggaagtactactgcctacccacgggctgggccaacttcggggtcacctcagaggaggagctgcacctcacacggaaactcttctggggcatctttgactctctggcccataaggtctgggcagcagggagccccaaaatggcctatgtggagggtttggggcccaaaattgggggtccagagtgaaatccctcaattttggggggttcaaggaggagaaggttctgcaagtttggatctaggaggatctatgggttgaggcttcgatttggaggttatgaaagagggggtggacctctagtttgggagcttggagagggcaatatggggatgatttgagcatacaattgggactgacatttgggtttcaaggagagggaccataattcaggtttggggttcagggaggagggctgatgattgcagtgtgtgagtttgaggtcctgggggtcagtaaggcttatagcgacctcctacccctgcttcacccggttttcccagaaatacgacccggagctgtaccgcatggccatgccttgtctgtgcgccattgccggggctctgccccccgactatgtggatgcctcatactcatctaaggcagagaaaaaggccacagtggatgctgaaggcaactttgatccccggcctgtggagaccctcaagtgaggcctgggggctgggagacagagaggaagatttcaggggtggagggaaccccagctccaacatctgctgaccctgtgcccccaacagtgtgatcatcccggagaagctggactccttcattaacaagtttgcggagtacacacacgagaagtgggccttcgacaaggttggcctcagggtcctcctatccaagaaaccctcaagaccccagctttccccccgacctggttcttccctgaggccccagatctccctgagaccccccagccttccctaagacccttagcttgttctgggacccccccaggattctctgtcctcggctcctccagggtcgccccgtgtgtccccaactgctgcctccccctcaccctgcctcccctccatctctagatccagaacaactggtcctatggagagaacatagacgaggagctgaagacccaccccatgctgaggccctacaagaccttttcagagaaggtgaccaggccttggggcccagcattgagggtcaaaatgaaacccccaaatttgaggattcggggaggagtgaggcaatttcacatgtttgcatctaggtggatctgtgggttaggtctccccattcatggactttgccttctctcaaacttggtagagtgggtagagactccgagagagtgggtttgattccttggctgtagtaagacttctcggagactcaagtgtctaatgggataaggagattgggtttgggaggctctgttacagagcaggtaagagacttgagttggaatccagactggaccattgcctagccacatggtcagggttttctcctttggggtccttcctccacccctctctcatcccattccaccaactccccaccctcctgtccaccccaggacaaagagatttaccgctggcccatcaaggagtccctgaaggccatgattgcctgggaatggacgatagagaaggccagggagggtgaggaggagaagacggaaaagaaaaaaacgcggaagatatcacaaagtgcccaggtgaaggcggggcctgggtggagggcaggggcacgatggggggagggtctagaacaaggggcatggccagacagggaagggatggagaggagaggggcccagggaggtaggtggggcaagaggggtgcagaaacctgagatctgggaaaggagagggcaggggtctgaagaactgcaaagggcagaggagagaaggatggggtggtttagagacagggccttaaggaaaggacaaggggtcttgagccaggggagggtggagggggtagaatggactagtggggcctggggaggggctggcctgggcttcctgctagcccatcagcccacctcccatcttccccttgtcctctcagacctatgatcctcgagaaggctacaaccctcagccccccgaccttagtgctgttaccctgtcccgggagctgcaggtgagagccctgatccttttggggggacatagggtgtctttgggggggctggcatcctctgaatctagcccttgactctgcatccactcccaggccatggcagaacaactggcagaaaattaccacaacacgtggggacggaagaagaagcaggagctggaagccaaaggtgagggcgcccatgccgcccccacgctacccccgtggattcaccgtgtggttttgctgattgccttcatgcccctgaaactcggtttctccatctgtagatgggaataataacagcgtttaccaccatggggtaatgagatgagcaccagcaagcaatgtttccgttattcgtatcttctttatcaccataattacgcatgccgggcactgcaggaaccacttcagtgagagtggcccgggtcttccccagagccctgatttctggtctttgcctccccaggcggtgggacccaccccctgctggtcccctacgacacgctcacggccaaggagaaggcacgagatcgagagaaggcccaggagctactgaaattcctgcagatgaatggctacgcggttacaaggcacgcgggttggggctcccgcggaagagcagcaggcagaacacacccggcaaaggctggaaggggcggggccagagaggggtggagccgagaggaacggggcctgaggagcaaagatggaaccagaggggaggagctaagggagtggggcctggacacagaggcggggccagatggggaggagttcgaaatgggcggggcttaagcacaggcgggaccagagaggagaggaggaagagaagggcggggcccagggagcagaggcggggccagagagtggaggagactgagaggggcggggaccggtgattggaggcgggaccaaagaggagagaaggctgaaaagggtggggcccggggaacagaggtagggccaaagaggaagaggctgagaggggcgggggctggggagcacaggcggggccagagaggggtggggaggtacagaggggcggggactggtgagtggaggcgggaccaaagaggagagaagggctgagaagggcagggcccggggaacagaggtggggccaaaggggaggaggctgagaggggccggccctggggaacagaggtggggccagagaggggagaaggctaagtggggtggggcatgggggactcagagtggagccccaacctggggtgaagccaaagctgatagagacggggccagcaggagcagaggcggacctgagaagggtgggaaactgtagggccggcgtctgggctgatccttctctccacatctccatgcagaggccttaaggacatggaactggactcgtcttccattgaaaagcggtttgcctttggcttcctgcagcagctgctgcgctggatggacatttctcaggagttcattgcccacctgggtacggagaaataccccccgcttatgcccgccccacctgcagacaccagttctgcagaccagactcacctaggacacctgttcatgcactcaatccgtcctccccttatctgatgtttattgagcttctactatgtgccagacactgttctagatgctggggtacagcagtgaagatgacaaatgacccctgctctcctgcaactactcctatgttggattcaggcaattagcatcataaataactaaatcgtttagtgttagaaggtgatcagtgttatgggaagaagaaaacaatagagccaggtagaggggattgggagtgtggagccagttgtaattttattttatttcattttattttatttttattttttattttatttatttatttatttttgagacagagtttcgatcttgctgcccaggctggagtgcagtggcacggtctcggctcactgcaacctctgctttctggtttcaagcgattctcctgcctcagcctcctgagtagctgggaccacaggcacgggcgccgccacacccagctaattttttgtattttttagtagagacggggtttcaccatgttggccaggatggtctcgatctctcgacctcgtgatctgccgcctcggcctcccaaagtgctgggattaaaggcgtgagccaccgcacccggcttgccagttgtaattttaaatagggtgttccagaaagactttgatgagaatgtgatatctgaggcaagccatgaaggaggtcagagaggagctgtgtggacctctgggggcatctgttccttgcaggcaaaggaacagcgagtgcaaaggccctgagaggtccctggtgtgagtgtcaggatgccctgtagctgaagcagagtcatcgagggggacggtgagataaacgaggtcacagaggtgactggggcagatcatgcagggctttgcaagctgtgatgaggactttgaccttacctggaatgagatggagttgggggttgggggctgagccgaggagggacgtgatccataattctggtgttcacagggtccctctggcttgactggggtggggacaggagccgaaaagggtgagaactgggcagatttctggatctattttgaaggctgaggctgctggggtgccccccagtgcctcttacaggccactaagaattacagctaggccctacaatcccctccagtttcccttagagaccccccccagcattccccttgagagctaccctcaggaacccccaaattccctccaggtgagtggcagagcaggattcgctgtcacgtctcacctcaaagcctgcctgctgagcttcagtgctgcacatccccctgacaattcccttccctctctagacctcagtttcctcacctgtgatatgggcatatgttcaccataactagccatggttctgttacttactgggtgacctggggttagttacttcacctgagtttcctcatctgaaaaatgggggttgggaaccaactgcacagacctccaagttgtaaggagactgtgtgaggatgacatgtctcacagtgccaaggacatagcaagtgtttaataattggagccagtattattattattattattattttttttttttttttttttgagacggagtcttgctctgtcacccaggttggactgcagtggcgcgatctcagctcactgcaggctccgcctccagattcacgccattctcctgcctcagcctcccgagtagctgggactacaggcgcctgccaccatgcccggttaattttttgtgtttgtatttttagtagagatggggtttcaccatgttggccaggatggtctcgatctcctgacctcgtgatccacccgcctcggcttcccaaagtgctgggattacaggcgtgagccactgcgcccggcccagtattattattttaatagtatcagttatgactgtcaccattattattgtttgaaatttatttccattttgaaattaactctaatttgtttacattgacttcttgtttcatttggttcattcattcatttattgcagattaactcagtgccatgtattcaagtttagaatgaaaagcacttatggtgggtgaggaagggcatgttccatgaccttaacccattccagtttgttttccccattgtcagcttcagaaagggtttgatcaaggagttgtcagcttcaagaaggatttgatcaagaagttgggggaaagcacattgggaggttgaggcgggtggatcacctgaggtcagaagtttgagaccagcctggacaacatggtgaaaccttggctgtactaaaaatacaaaaattagcttggtgtgtgggagcatgtctgtaatcccagctacttgggaggctgagtcaggagaatcgcttgaactcaggaggcagagagtgcagtgagccgagatcgtgccattgcactcctgtctgggtgacaagaaaaaaaaaaggagttgggggaatcagatgaaagataggagaaaggtttatctcaaagccaacacaaatgacttcataccaatactttatcccccatcatttcccaactctgctcccagcatccttcccatcagaacaccctgggttccccagccttgaacccactgtgaaccctatttgccctccctacagaggctgtggtcagcagtgggcgagtggaaaagtccccacatgaacaggagattaaattctttgccaaggtgagaggtgggcttagaagctggagggcgctggggactcataggctctccccacccctcattggaccctttatctcccccaacccgtctccagatcctgctccctttgatcaaccagtacttcaccaaccactgcctctatttcttgtccactccggctaaagtgctgggcagcggtggccacgcctctaacaaggagaaggaaatgatcaccaggtgggccgcctgtgaccctggacccagccccctgacctcacaggattgtaatcctttgcccatggaggctctgtcctgggtgctgggtgttgggtactgaccgtctcctgcaaaggcgattgaagggtgaccagccatcctagtgtacccgggactgaagggtttcccaggatgtgggactctcaggcaacttgggacaaatcgatcaccctgtccaggaaggccaactcaaggccgggcgtggtggctcatgcctgtaattccaacactttgggaagctgaggtgggaagatcacttgaagccaggagtttgaggccagcctgggcaacatactgagaccccatttctacaaaaaatacaaaaattagccgggcttggtggtgcatgcctgtagtcccagctactcaggaggctgaggcgggaggatcacttgaacccaggagttggaggctgcagggagctgggatcgtgccactgtactccagcctgggtgacagagcaagaccctgtctaaaaaaaataaacaaacaaagaataataagaaaggctgactcacccctcacctccccagcatcccagttactgcctgtgacattccagcttgcccatctctctgccccttcccatccctcctgtctccatcatttggaccccctcctggttcctctctccttgtcttctctgtccctgtctcctctaattgggtcacgctgtcctcgtctccttggcctcctcactcgctgtttctcctgccttctgtccctttctctttcttcagcctcttctgcaaacttgctgctctcgtccgccaccgagtctctctctttggtaagtggctccacaccttcggtcttcctccctaatctttctcttccccaccctgaagaaatagctcccaggttctgccttaatttgaacaacctttgttgttttcttcccctggacctggagacatggaccaggtatccggggggtagggcagtgactgagatgccctgggcctgccctcaatggagctcccaggccagtgggagagacagacctatctccagacaaggacagcccagtggggtcagggctgggcaggaggaaggccaggagagtggttgggctggggaggagggacatttggaggcgctgtaggagtctgggggggtgggggtgcagtagcattccaacttagcccgcaggtagcctcaggaagagagcggttggggtggatgtagagggaggcactgtcctctgtcctcttagccatggcatccccccggcccatcttcctctcccagggacagacgccccagctgtggtcaactgtcttcacatcctggcccgctccctggatgccaggtagggccataggcagtggcgcccactcccaccatcatcgggcccccaccccaacccctggtctcctagactctccgattccagagctgatgttcccccgctgcccttctaggacagtgatgaagtcaggccctgagatcgtgaaggctggcctccgctccttcttcgagagtgcctcggaggacatcgagaagatggtggagaacctgcggctgggcaaggtgtcgcaggcgcgcacccaggtgaaaggcgtgggccagaacctcacctacaccactgtggcactgctgccggtcctcaccaccctcttccagcacatcgcccagcaccagttcggagatgacgtcatccgtaagggcgcctgacccaagggcaggttgcggggagtcagtgtggccaacaccacccatccgggtgcctgtgagagtccctgggtgtttgaatgtgtggatttcttgctgtaagcaaagcatgcagtcagtaccttggcaggtggcaaatgagttaatgaggacgcgagctcagcagctctaacaaaagaccctaagtggactggcgcagtgactcacacctgtaattccagcactttgggaggctgaggcaggaggaccgcttgagctcaggagttcaagaccagcttgggcaacatagcgagaccctgtctctactaaaaaaaaaaagaaaaatttaaagattagccaggcatggaggcacatgcctgtaatcccagctactggggaggctgacaagggaggatcacttgagtccaagagttggaggctgcaatgagctatgatcataccactgcactccagcctggacaacagagcaaaattctgtctctaaaataaataaataataaaatagggtccttgatgttaaaaaagagagtctattgataaaggttaggaaaagtagcacttggccgagcgcagtggctcacgcctgtaatcccagcactttgggaggccaaggcggacagatcacctgagctcaggagttcaagaccagcctggccaacatgatgaaaccttgtctctactaaaatacaaaaattagccgggcatggtggtggtcgcctataatcctagctacctgggaggctgaggcaggagaattgcttgaacccaggaggcgaaggttgcagtgcaccaagatcgtgccattgcacgccagcctgggcaacagagcgagactccatctcaaaaagaaaagaaaagtagcagttggtggccagccacagtgactcatatctgtaattccagcactttgggaggccaaggtaggaagatctcttgagcccaggatttcaagaccaacctgggcaacatagcaaaaccccatcttaaaaaaaagaagaaaagaaaagtagcacctggatagggttcttctcccatccaactttgtattttgaaattttcaaaacatacaggaaggtagaaagaagaaaattgttggcggggcatggtggctcacgcctgtagtcccagctacttgggaggctgaggcacaagaactgcttgaatctgggaggtggaggttgcagtgagctgagattgcaccactgcactccagcttgggcgacagagcaagactccatctcaaaaaaaaaaaaagaaaattgttaacaatttgccctgtgtgcctacccttcactgtatggttgaaagtatttagttttttttgttgaacttttgggtgtaagttgcacacaccagggtaacctcatcccttaatgttcatcagctggctttcctagaataggaaccttctcttgtgtaaccacggtatcattatcatacctaacctaaccatatttaaatttccctcattacccacaaaatgtctttgatttttttaaaagaaattcagaatccagtcaagtttctcctgctgcatttggtggttgtgtctctgtagtgtctttaaagtctagaatagccccgccctctttttgcctcatgatgagcttcttaacttggccttctggagggcatgtggttaacctaaaattggtctgggcacagtggctcgcacctgtaatcccagcactttgggaggccgaggtgggcaaatcacttgagaccaggagtttgagatcagcctgggcaacatactgagaccccatctctaaaaaaatttttttttaattttttttttttttttgagacagagtctcggtctgtcacccaggctggagtgcagtggcgcaatctcagctcactgcaacctctgcctcccgggttcaagtgattctcctgcctcagccccccgagtagctgggattacaggcattcaccaacacactcagataatttttgtatttttagtagagatggggtttcaccatgttgcccaggctggtctcgaactcctgacctcaggtgatccgtccacctcagcctccaaagtgctgggattacaggcatgagcctctgcgccaaccctaaaaatatatacattttaaataaaatgaaaaagatagcctaaaattgcagcaatattgcagttctgtttgcatttttctggaggaagtacccctcactttcattatagagggccatgagtcctctccacggaagaaacaacatctagcctttattgagtgcctactgtgtgccccgttctagtggctttccaagtagtaactcatttgatactcacgaccaccccgtgaggaaggtactataactatccccatgttacaggtagggaagctgaggctgagagagagttggtaacttgctcaagtcacaagactcgtacatggaaggctggctgtacatctgcttgctcttccccactgcatgggcctatttgagacaagggaggtggggtggggagggcttgtcttgtgagcgcatgccgcagcctcgccccctgtctccctcagtggacgacgtccaggtctcttgctaccgaacgctgtgcagtatctactccctgggaaccaccaagaacacttatgtggaaaagtaaggagagggagccatcgtttggggctgggtggggctggaggggaagggagggagcaggggaagaagatggggtgggtgaaaagcagggtagatgttaagaattttcccgcacacggcggcagccgcggttccccacggcggccgcgtgagggcgctcagggacaggtcagccacggaggtagagccgccaggtctggggctgtgaagcaggcaggcctcgctggggaagaaagggaggcgcagaccacgggggctgcacacaggagccacgcaacactggggtcactggggagggcccctggcagtggccatgtgaccgcttctgagctgagattactgatacagcaagagcgaggctgcggctgtttccaccagctctgaagttattcagatttcaagtgacaccagcggtgcgcggtggctcacacctgtgagcactttgggaggctgaggcgggaagatcacttgagctcaggagtttgagaccagcctgggcaacatagtgagactccatctctacaaaaaaaaattttttttaattagcctggtgtggtgtggtgtagtggcgctggtgcctgtaaatccacctactcctaaggctgagatggggggatcgcttgagctccagcctgagcagcatagggagactgcatctctacaaaaacgactttttttaaaactagctaggcatggtatggtgtgtgcctgtaatcccagcgactcaggaggctgaggtgggaggatcacttgaacccaggaatgtgaggttgctgtgagccaagatcaggccactgcactgcagcctgagtaacagagcgagaccctgtcttaaaaaacaaaacaagtggcacacatggatgaatggcagctctgtcccaaagggttctgggaggagccgtttctatggagatggggctgggacccaggaccccaaagagggggacacgtggcagctaaacacagccccgtcttccaggcttcggccagccctcggggagtgcctggcccgtctggcagcagccatgccggtggcgttcctggagccgcagctgaacgagtacaacgcctgctccgtgtacaccaccaagtctccgcgggagcgggccagtaagctgtgtggggcgggagcagtgctgggagtccaaatctccccagcacagggccttggggagaccctaatttgggggtagtgtggctgggctgggctgtgagcggctgaggattccccaggttgggagtgccacacattcaggaaccccagagtttatggttcgggggcatttcaaggccgttacatggggagaatttagagattaatttgatttttgaaaacagaatctattgataaaagttaagaaaagtagcacttggtggccaggcgcagtgggtcacgcctgtaatcccagtactttgggaggccaaggtaggaggattgcttgagtccaggagttcaagaccaacctgggcaacatagcaaaaccccatccatggaatttggagctatggaatttattttagtgatggtgacatttgagggcatcatcaagcttggagacatagggtgaggggtatttgagcataagaggattgagggaaggcagggttcattcattcattcagcaaatatgtatcgagcagttactatgtatgaggcgctgtcctagtcacctgaggttcagcagtgaacagataaaacagacaaaaatcccctgagtcctgggtccagaggctagaatgaggtgtggacctgggggaaatatacgctccaaggcaggaaacttgtcttcttggtcagctgttctcccagaatggcacctggcccagagtcagcaagtgagcaagtgacaggttgtcggtttcaagggactgaaccgggtgtgggattcagagagacaaggcggggagacagggtggggttggaaaaggtctcttttggagtatgctgtacagcaggggtgaggggaatgggcttgggatgtgggagattttaggagggaaggtttctaggggtgagattttagggagcagacaggctcgggggtgtgaagtgtttgcggggccactgagtttcaatgtgagggttgggagaggtagttgggttggagggtgagatgggaagaatagggtttgggagactgtttaaggggggtggcaattcaatggtgtctgatgtattgcgggggaggccagggcactgaggtctgggggtgatggcttgacattccctgcccccgtccctgtaccccagtcctggggctccccaacagtgtggaggagatgtgtcccgacatcccggtgctggagcggctcatggcagacattggggggctggccgagtcaggtgcccgctacacagagatgccgcatgtcatcgagatcacgctgcccatgctatgcagctacctgccccgatggtgggagcgcgggcccgaggcacccccttccgccctgcccgccggcgcccccccaccctgcacagctgtcacctctgaccacctcaactccctgctggggaatatcctgagaatcatcgtcaacaacctgggcattgacgaggcctcctggatgaagcggctggctggtgggtcggggggcactgggcctctgaggggtgggtcagcagcctgggctcccttggcagatggtctgaaagggagacccatggtcccctcggagttgggaggagtcagagtgtaggttttttcagcatcaaaagaccaggggtcagctgggcaccgtggctcacagctgtaacaccaacactttgggaggatcagttgaggccagccatttgcgaccagcctaggtaacatagcacgaccccatctctttaaaaaacaaaacaaaacttttttttaattagccaggtgtggtggcacatgcttatagtcccagctacttgggaggctgaggcaggaggatctcttgagcccaggagttggaggctgcagtgagctgtgattgcaccactgtactccagcctgggtgacagagtgagatactctctcaaaacaaacaaacaaaacaaaaggaaagaaagaaggaaggatggagtgagagagggagggaataaaagggaaggaaagaaggaaggaaggcaggaaggaaggaaggaagaaatggatcctcaaagcgttaggtttcctgattcagaagtttcatgtcagggccaggcacaatggctcatgcctgtaatcccagcactttgagaggccaaggtgggtggatcacttgagaccaggagttcaagactagcctgggcaacatggtgaaacctcgtctctattatttaaaaaaaaaaaaaaaaaaaaaagaaatatttgtgtaaggaaacaggttgtagatcagggtcaacctagaaatcaggagctgggatcagaggccagggtaaggggccagaggctggggtaagaagcccattcacaaccttggggtcatagccagaaatcacatagtgaggtaagactctgggtatgggccaggtcagaggttaaagattggggtcaggggtcatgctagttaagggtgaggtaacaggccaggtgcagtggctcacgcctgtaatcccagcactatgggaggccgaggcgggtggatctcctgaggtcaggagttcgagaccagcctggccaacatggtgaaaccccatctctaccaaaaatacaaaagttagctgggtgtggtggcagacgcctgtaatcccagctactcggggctgaggcaggaaaatcgcttgaactcgggaggcagaggttgcagtgagccaagattgcgccattgcactccagtctgggtgacaagagtgaaactctgtctcaaaaaaaaaaaaaaagttaggtaacaggtgaggcgtctgttgttgggggtcagaggtcagggatttgtgccaggctggggtcacaggatagggactgggtcttaggttcaggttaggggctatggctgggatcagtgttcagggactatatccaaggttagggtcaggctggggtcaaatggcagctgctaggttggagatgctgtttgggagtcgggctgggaacggagtttggggcctgtgtcagaggccggaggtggcatcagagcccatcgcacccctgcagtgttcgcacagcccattgtgagccgtgcacggccggagctcctgcagtcccacttcatcccaactatcgggcggctgcgcaagagggcagggaaggtggtgtccgaggaggagcagctgcgcctggaggccaaggcggaggcccaggagggcgagctgctggtgcgggacgagttctctgtgctctgccgggacctctacgccctgtatccgctgctcatccgctacgtggacaacaacaggtcagcggggccccgctgtccccatgccctccgccccgacctcccacgtcctccagccccatctgatctccgcctcctgactggctagaaacttcttccaatgctctggccccaccaaccttctgactcttcctcctggtttcttctggctttgagcacattggtccaacgacagccagcccacttgtttgtttctttttgtttttggtttttgggtttttttttgtttgtttttgtttttggagacagagcctcgctttattgcccaggctggaatgcagtggcgcgatctcggctcactgtaacctccacctcccgggttcaagtgattctcctgcctcagccttcccagtagctaggattacaggtgcatgccaccacgcccagctaagtttcgtatttttagtagagacagattttcaccatgttggccaggctggtcttgaactcttgacctcatgatttgcctgcctcggcctcccaaagtgctgggattacagctgtgagccaatgcagctggccagtgtgattttttttaaatcattctcctaatgctggacatttagattgtgtcgatttctttgtcactatgcacaacaccgtaaggaatagtttgctttttttttttttttttttattgagacagggtctctctctgttgcccaggctggagtgctgtggcatgatcatggcttgctgcagcctcggttcctgggttcaagcgatcctctgcttctgcccctgagtagctgggattatagactcacaccaacatgctcggctaattcttgtatttttatggggtctcactatgttgcccaggttggtcttgaattcccggggtcaagtgatcctcccacctcagcctcccaaagtgttgggattacagaagtgagccaccacacttagctgctttttttttttttttaacacaacaatacaccatgaaagacatataggccgggtgtggtggctcatgcctgtaatcccagcactttgggaggccgaggtgggcagatcacctgaggtcaggtgtttgagaccagcctggccaacgtggcgaaaccctgtctctattatgaatacaaaaattagccaggcgtagtgacgcaggcttgaaatcccagctactccagaggctgaagcaggagaatcgcctgagcctgggaggcagaggttgcactgagctgagatcgtgtcactgcactccagcctaggaacagagcgaggctccacctcaaaaaaaaaaaaaaaaaaaaaaaaaagatgtatagattcacctcttttgtcttggtggtcgtgtgacattctctgctgttggatatagttcaatttttcaatcagtaaatatgaacaaattgtggtttattcatacaacagaagactccacggcagtgggagtgaacaagttgtttctatgcacaatgtgattggctttcacaaatgttaggtggaatgaaagaagccagaaaaccaagaaataaactacatattttaccatctgtttaatgttcacgagcagataagaataagtttggggccgggtgcagtggcttacaactgtaatcccagcactttgagagactgaggcgggaggatcacttgagctcaggaatttgagaccagcctaggcaacatggctagaccctgtctctacaaaaaaagaaaagaaatacaaaaattagtcaggcatggtgacacacacctgtagtccttgcctcaggctgggactgggaggctgaggtgggaggatcgtttgagcccaggaggtcaaagctgcagtgagctatgatcacaccgctgcactccaacctgggcaacagagatagaccctgtctcaataaggtttgtttttttttaatacaagtaaatgaataaaataaaatatgtgaacctacttagattctgaccctgtctcaaaaaaaaaagaaattttatgctgggtgcagtggctcgtgactgtaatcccagcactttgggtggccaaagagagtggatcactcaaactcagtctcaaactcagaagtttgagaccagcctgggcaacatgcaaaaaccctgtctctactgaaaatacaaaaattagccgggcgtggtggcgcatacctgtagtcccagctaagtactcctgagtgggaggctgaggcaggagaatcacttggaacctgggaggcagaagttgcagtgagctgagatcacaccactgcactccagcctgggcgacagagcgagaccctgtctcaaaaaagaaaaaaagaaaatttttttttttttttttgagatggagtctcgcccaggctggggtgcagtggtgcgatctctgctcactgcaagctccacctcccgggttcacgccattctcctgcctcagcctcctgagtagctgggaccacaggtgcctgccaccacacccggctaatttttttgtattttttagtagagatgaggtttcaccgtgttagccaggatggtctcgatctcctgacctcgtgatctgcccgcctcggcctcccaaagtgctgggattacaggcatgagccactgcgcccagctgaaagaaaaaattttaaaaagtttttagcctagaagttagaatatggatgatttttcaggaggaggaagggggagtggctgggaggggccatgatagtacttccagggaccagaaatgtcctatttcttgacttcggtgctggctacacaagtgtgttcatttgtgataattcaccaggttgatatttcttaatatgtaggttatataatacatatgtatgtatcatgtgtgtctatgtattgcatgcatgtattatatttatgtatttcgatgaaaaggttagacaaagttttttaaaaaaggaatagtcaggccagggaaggtggctcacacctgtaatcccagcactttgagaggtcagggaaagaggatctcttgagcccaggagttcaagaccagcctggacaacctagggagaccctcttcctacaaaaaataaaataaaacattagccaggcctgggcatggtgacgtgcacctgtagtcccagctactcagggaggctgaagtgggaggatcacttaagcctgggaggttgaggttgcagtgagtggagatcgcatcactgtactccagcctgacagattgagaccctgtctcagaaagaaagaaagagagagagagagagagaatggatcgttaaaaaattttaaatgttcagctgggcacagtggcttacacctgtaatcccagcactttgggaggccgaggtgggtggatcacgtaaggtcaagagttcaagaccagcgtgcccaacatggtgaaaccccgtctctactaaaaatacaaaaattagcccggtgtggtgtcgggcccctgtagtcccagctactcgggaggctgagacagagaaaaaaaatttttttaatgttcatctgcatggccagatgaccctagaaaccccatccctctgactggatgtctcctggtccccatctcctcctccaagatctctctctgggcagcccccttccctgggatccccaccccctccctcacctcccctccgctgaccccagggcgcagtggctgacggagccgaatcccagcgcggaggagctgttcaggatggtgggcgagatcttcatctactggtccaagtcccacgtgagtgcccaccccaaccgccctccccacaaccagaggagccgcagcccacaggcgcctgccttcacctgtccggtctgcaacactgcttcccccaccagaacttcaagcgcgaggagcagaactttgtggtccagaatgagatcaacaacatgtccttcctgactgctgacaacaaaagcaaaatggctaaggtcggggcttggttctgggaggagcacttggcagagagggcgggagcaccctctaggacttcctacctggcctgtcctcacccagccagcccgtcctgggcgcaatccctgcagtcctcagagcagcccctcttacctcctctccctctcccttcctccccagctccttcctcctcctgtatcttctccctcctcccatctccctcctcctctccatctccctcttctctcatctctgtctccttcctcctcctgtatcttctccctcctcccatttccctcctctccattttcctcttctccaagcctctctctcctcccatttccctcctcctcctcctccccattttccccctcttccatttctttcttcctctccccattaccccatttcctgctttcctccctatccttctcagcactgcccttctcaggtctcagagaacgaccccccaccccgagccaaggcctggaaatgcccagctagagaatacatggcgggtggggcagaggaggtggggtgctggcaacttggagttgggcctgggcttctctgcggggctggggtaacccttcttgtctctgtctgcggtccggtgaagcaggcgggagatatacaggtcagccccacatctgggaccttccgcatgtctcttggctaatgccctcttcccccagcctctgcacgcccccgcctcgagaaaacccctgcttctgttccccacccccgtcctcccctcccagcccccacccatcctccttcccttcccttccctccccaccacccccatccgttcccatcccaaccctcagcttttggcaatttgacttcttttctttttcttctttccttttttttttctggacttttgttcccaaaaaaaaaaaaaaaaagaaaaaaagagcaactctcagcttttaccaaagcatcgtgggctgaggtcaagggtaatgggggtgggagaggcacacggagcatggttggggagggggcagcaccctcgccgtggatggtttaaagcttgggctctggactgtatggactggggttagaatcctgtcttgatagttagccgtgtgaccttggttggggtcatccttttgagcctctgagggcatccagccagcagcccccaccccagggctctgcgaggactcagggagaagctgcatgtgtggcctgcagcagtgcctggcacaggggtcatgctcaaagttgccagccggcgtggatgtggctctgcccaaaagcttgtcatcagggcttctcgctggcgtgactggggtggccctggccccgggtctgcacccaaggctccagaacacggctgtgggactctgtgccctgtgtctctgcttccagatctttctggatgtctcttgcatctttggtcttcctgtctccttgtctttttcagtctctcagtgtctttttcttgcaacttctcttgtcgcttgaactctttgtggacctgcatctttgtttcattcttgagaacttggttttgggatgtgaagtgtggggttgtgcatgctgtggagggggtattgtactggggttcctaggggattctggaagaggactgctagaagttgagacaggcccagaacgggggaaaatctggatgggcctgggttagaaattggagccaggcaagcatggtggtatgtgcctgtagtcccagctacttgggaggctgaggcaggaggatcacttgaagccaagagttcaagtccagcctgggcaacatggcaagacaccatctctaaaaataaatttgtttaaaaaacaagaaactgggaatttgggttgtggacttgggtctggagggtctccggtcatggctgtgggcctgaagtgtagagtcagcaagtctggggtggaaattgaggtgtcgtcggcagttggggagggagtgcctggtgtccagactggggcctggggtgtggatgatggccgcgggttggggctgaggcatgggattggggcttgggctggtgctgagccctgtgtccccacagtccggtggctcggaccaggaacgcaccaagaagaagcgccggggggaccggtactctgtgcagacgtcactgatcgtggccacactgaagaagatgctgcccatcggcctgaatatgtgtgcgcccaccgaccaagacctcatcacgctggccaagacccgttacgccctggtgcctgcccagccccgtcctcggaaccttccaggatgccgcccagcacccactgaacccctgggaccttagggaacaaccacaatgccactgagccccccaggtccctgggagccttcccttcagaccccactgagttcttttccgggatgctgaggactcactgtgcccctgggatgccctgaggaccccgttcaagatattgccagggcaccacagacctaagagccctcactgaaacctagaaaagctctaggacccctgggacccgcatgaggactgcaggaccccactgcccccccaccggaccatgccaaacctgctgagaccctgagagtccccccaacaagatgagcccctgagatcctctgaaccctccaccaaggccccttcaagccccttgggacctactgagaccctcatgacccctccttccctccctgccaagactgaacctctgggttcctgctgagcccttggctcaccatccctttccttcaggaccctgctgacacctgggccctgttgaagcccaactaagcccccaagactctcaggggctcagggagccctgcgaccctgcataactccccaggatccatgaaccccaagcccgggactgtacccaaacctctgaggtctcaactgtcctggagaccaaaatacccgggctgtagaacctcttaagcttgctgggatatcaaggaggcctcccgggaccccacttaccccttgtgtgggacaacaaggacaatctccctcctctccgatcctttccagcttcagggactctaaggaaccctcccaggattctgccccaagacccctatagccctccccccaggaccacaccaacaccctgacaacctactaaccccctggacccctaaagaccaccgacttctcccctgctaccaccaggacaccccttccctcagaacctcaggcacctcccaggactgctgagtcctgccaggacgccagagagccctccagggctccatggacccctcaccttggtccttgagggctccccgtcctagaaccccagtgaacccccaccctgctgatgccccctttggcccctgtgtaaccagtgactccgttgacctacgtgatcccccatgacctctgctgaccccttctgatcttcaaagactccctgccccactctgaccccccagtcatccctctttggccatatttgacctttgatgagatcctcttgtcaccctttgcctcttcccagacctccacgaggcccctcgaatccttactgtatcttcaaggtgactctgtgaccctccggcccctctaggaccccttctgaccccgtcaacctctgcatccttttgtttctctcagacccccacccccaccccagaaaaacctcttcagttcctggggtgctgggcctggaaggaaagggttgtgggtcaggaaggaggatgggacctccagagtgacccagcctggctctgtctccccagaaagacacagatgaggaggtccgggaatttctgcacaacaaccttcaccttcagggaaaggtatgcctccttcctctgcaagcaaaagaagcaagtcagaaagtaaccacaatattagtgaaggtttgagcatttaccaaagaccaggcattgaagaaagacctcaaaggtcaggagtttgagaccagcctggccaatgtggcgaaaccatgtttctactaaaaatacaacaattaggccgggcacaatggctcatgcctgtaatcccaacactttggaaggccaaggcgggcagatcacctgaggttaggagttcgagaccagcctggccaacgtggtgaaaccccgtctctactaaaagtacaaaattagctgggtgtgatggcgggtgcctgtagtcccggctactcaggaggctgaagcaggagaatcgcttgagcccaggaggcagaggttgcagtgagctgagatcgcaccactgcactccagcctgggtgatggggcgaggctccgtctcaaaacaaaaagatgaagaagaagaaaggcctcaacatgcactcacccattgagtcctcccaaaaacggaaaggggacatccggcggacactgtgggaagggtccctcacgccggccactccttcttcctcccttcaggtcgaaggctccccgtctctgcgctggcagatggctctgtaccggggcgtcccgggtcgcgaggaggacgccgatgaccccgagaaaatcgtgcgcagagtccaggaagtgtcagccgtgctctactacctggaccaggtgggtggggccggaggggtctttctactgggtctctgggcggagcctggcggggggaggggcttcaaggatgtgggtggggtctggagatgactattaagttttggggcagggcaggaggtggagcctcgagtttaaggcgaggcttagaatggatcgggggaggggtctgctgcttaatcttgcatctgggggcgggacagggaaggggcagatctttaggtctaggggtggggcctagaggagatgcgttgagtttgtgggcagggccttgggtgggtcgtagaattggtcgtggcctggctcgtggtcctggctctgtgggacctggcctaggatggaaacttaggtctggaggcggagtcaggaccctgactctgttggtggagacaaggttttccttctgccgtgtgagtcttaacctgaatatggacttcgacacagctgggcagtttcatccagggctgggagtgagaggggcagggtctggggatgtgactgtcctgctatcccctccccagaccgagcacccttacaagtctaagaaggccgtgtggcacaagcttttgtccaaacagcgccggcgggcagtcgtggcctgtttccgtatgacgcccctgtacaacctgcccacgtaaggcccccagggacaagggaagcgtgaagggctgcggagaaagggtggctggagagtctggagaatggagggccaacgtgatggggccttgagggtggttgggggctgcaggcgcatgggaggtcgggaagcacggaggagggcgcgtcccagtgacgtcacacctctcccctgcaggcaccgggcatgtaacatgttcctggagagctacaaggctgcatggatcctgactgaagaccacagttttgaggaccgcatgatagatgacctttcagtgagctgggacccgcctgggggagtggggggcgagctggatagggctggggcggaggccacccttggcacacctccaggggtcggccctccacatcaaggggtatagaaatgccagctcctggcttgagtagaaccaaagtagggcgcaggatgtgggaaaagagaaaaaaaaatccagaccaacagggacatgggggcagtgacaggaggggactctagaaaccctctccccaagtctcccctctcccaccagaaagctggggagcaggaggaggaggaggaagaggtggaagagaagaagccagaccccctgcaccagttggtcctgcacttcagccgcactgccctgacggaaaagaggtgaagactcttgccagggccccagaaatgcccccaaggtcctggggccacccccagcccagcagcttccctgtgcctcaggagaggccctccaggtcctgggggagcccaagacagacggatctttaaatatcactttgctggtcaggcacggtggctcacgcctgtagtcccagcaatctgggaggctgaggcaggcaatcacttgagcccaggagttcaagaccagcctggccaatatggcaaaaccccgtttctacaaaaatacaataaatagccaggcttggtggtgggcacttgtaatcccatctactcaggaggctgaggcggaagaatcgcttgaacctgggaggcggaggttgcagtgagccgagatcataccactgcactccagcctgggcgacagagcgagactctgtctcaaaaagaaaagaaaaggaacgtaaatgtcactttgctaggacaggcacagccaacatacaccgttgcatggctgaacacttcacaagggcatgtctgaggggttcgtatcacagacaatgtagattaactaggcttttctagaagaaagtgtcttgctcaaataaaatcagtatattatgaaaaaaatccatatgtatgacaaatttccaacagacagaagtagtggggaggttttctgtaattccctcaaaagcttcatgtaggctaatgacaggcttagtaataaataattgtgatgcagatggcgcagctgctgccgctgctgctgacagtagcaggcagccattcatcaaatgcttattatgtgtcaggcaccaagctaagcggggatatctatatcctctcacttaaccgccacactgtgagacggattattgcatctcctttgtgtggataagggaatgaaggcacagggatttatttttcattttgtttatttatttatttatttatttttgagatggagtctcgctctgtcacccaggctggagtgcagtggcacaatctcagctcactgcaacctccgcctcccaggttcaagcaagtgggattacaggcgcccaccactacgcccagctaatttttgtatttttagtagagacgggctttcaccatgttggccatgcttgtctcaaactcctgacctcaagtgatcttcccgccttggcctctcaaagtgctgggactacaggcgtgagccactgcacctggcctacttttttattttttgagaagatcttgctcttcttgcccaggctggaatgcagtgtcatatcatagctcattgcagctcagaccccccactccacatcaccccaggctcaagagatcctcctgcctcaacctcctgagtagctgggactacaggcacgtgcctccatgcctggctattttttttttttttttctggtagagatgggggtctcactatgttgcccaggccggtctcaaactcctgaactcaagcaatcctccccactcagcctcccaaagtgttgggattacaggcatgagccaccgcgcctgtcagggatttgtttttcttacataacgtgaagtcaagagctaaagacttcaggactgggcagtggcacagggacactgacaggggcccagggtctttctagctttctgctctgcccttcttagcttttgtctgtagtcctgggtggatgctgcacttctaggcatcacagccacatgccaggcagaaagaaggacaaagggtccccactcttcaccctcagcaagatctttggtctctctctcttttttttttgagacggagttttgctcttgttgcccaggctggagtgcaatggcgcaatctcggctcgctgcaatctccacctcccgggttcaagcgattctcctgcctcagccttccgagtagctgggattacaggtgcatgccaccatgcccagctatttttcttttttctttctcttttttttttttttttttgtatttttagtagagacagggtttcgccatgttgtccaggctggtctcaaactcctgacctcaggtgatctgcccaccttagcctcccaaagtgctgggattacaggcacgagccaccgcgcccagccttctttggtctctttatctctctggtgagcttccacacagatctcattggccagaaattctgacataaggccatctcgggctgcaaggtgatgaagaatttgagcatcccattttgcatcctgtgggagagcgatggctctggagtttggccatccaagttgagtcccagcgcaagctgtgtgatcccagccgagaagggtctttgtatcttagttcccccaccgataaaatagggctattaacatacccacccaattggatgactgtgagggtcagtttgttaatatatacaaggcacctagaacaggcactgacatggtgttagtgtaaacactcagcaggtgttggccattgtagaggagacccaagcagaaagggattggccatacttgttattgagctgacaggtggcaagatggctctgggagctccagccttccatcactccattttagcatccccagtggaaagggagtgcctccaccattagctccagcaaacctcactgaatgggccaggcgcggtggctcacacctgtaattccagtactttgggaggccaggagtttgagaccagcctgggcaacatagcaagaccctgtctctacaaaaaaatggaaaaattagccaggtgtgttggtatgtgcctgtagtcccaactactcaggaggctgatgtgggagatcacttgagcctgggaggttgaggctgcagtaagccttgatggcaccactgcactccagcttggccaacagagcaagaccctgtctcaagaacaaaataaacaaacaaaacaactcccagaatggattttactggacagcatggacaacatgaccatttcttacctgtcatcatggccacacagataaaagtcctcatcggccatgcatttgtcacaagccaccctggcaatggccactccagccacctgagtcacacagcctgaacatggggagggttggccctccaaagaaaaccagaagctctttttttttttttttttgagatggagtcttgctctgtcacccaggctggagtacggtggcgcaatgtcagctcactgcaacctctgcctcccgggttcaagcaattctcctgcctcagcctcccgagtagctgggattacaggcaagcaccatcacacccggctaattttttgtacttttagtagagacggggtttcaccatgttggctaggttggtttcagactcctgatctcaagtgatctgcctgcctcagcctcccagagtgttgggattacaggcatgagccaccgcaccctgcccagaagctcttataagatgggggtcctctccaccgggtcctgaccactcccctgcttacttccccagcaaactggatgaggattacctgtacatggcctatgctgatatcatggcaaaggtgaggccctacccccctcttctggggcagatttccctctccccacctgcagtgcttgtccacaaaaagggctggggcgggatggaggggtctgctttgttcatcccttaactgatgccccctccccagagctgccacctggaggagggaggggagaacggtgaagctgaagaggaggttgaggtctcctttgaggtaggtgggctcaggaggtcctggagggaagggatgggggaccctgactgcagtcatctcccattcattcagcatgtgttcacagagcaaagctctggggacacagcagtgaccaagtcagtccactggggagacagatacacccgccaaactaacaccacggagtgtacaccatggtcatgggggaagctcaggcagaggggtcagggctggaattggggaggctcaggcagaggggtcagggctgggattgaggaggctcaggcagaggggtcagggttgggatgatggggatacaggcagaggggtcagggccaagatgggggaacctcagggggataaagcagcccaaacaaggtgcctgacccagcctgcaggaaaatgtatcagggagggcttctcggaggaggggacttctgagcagaaggataaaaggagcctgccagttgaagaaaaagagaaaaatgttctacgtagggagaatagtatatgccaaggccaggcagcaagaaagagctagtaaacatgcaattcaccgatccattcattcattgagacagttagcaagcatttacttcatagttttcttcactgtttctgtgccagagtcccttctggcatctggtgaagactttctcaggatcatgtttttaaatgtataaaatgaattcatagcagaggaaacaagtattgaatagctatcaaaatattttaaaaatgaatttgtgatccagtaatacttgtacattgttaatctatcaaataagatctaaggctgggcgcagtggctcacacttgtaattccagcactttgggaggccaaggcgggtggatcacctgaggccaggagttcaagaccagcctggccaacatggtgaaaccccatctctactaaaaatacaaaaatgagctgggcatggtggcaggcacctgtaatcccagctactcaggaggttgaggcaggagaatcgcttgaacccgcgaggtggaagttgcagtgagccgagatcacgccattgcactccagcctgggcgagactccatctcaaaaaaaaaaaaaaaagatctagcagtagatccaacagctactataattgagaagtagtgatgaacataactgatatttaaagacatctttgagccattgtgagtgagtctctcttcctggaccaaaagagcagaatttgaataggaaatggttctaattctgcaacaataatgtgatatggaatatacagcaataataatgtgatatggaaccatctgtaattttttttttttttttttttgagacagagtctcgctgtgtcgcccaggctggatggagtgcagtggcgtgatctcagctcactgcaacctccacctcccgggttcaagcaattctcctgcctcagcctcccaagtagctaggactacaggctcatgccaccacgcctggctaattttttgtatttttagtagaggcggggtttcactgtgttagccaggatagtcttgacctcttgacctcgtgatctccctgcctcggcctcccaaagtgctgggattacagatgtgagccaccttgcccagccacatctgtgatttttattggtgacaaagccacaggttctgctaatatcgctgtgatttatggcttcatccatataggaaggaaatgcttcatttctgttagagggcggaaaacataaaaatgtaacttttcatcatccaagttcacagatggcctggaggcccatgggcccaggttaagactgctgcatgcccagctctgatttatgtagatcttgcctaatgcctagccccgtgctaggtacaggagatacatcgagggtgtgagccccaggggatggagggagctcatggttgaaggagtgagttgtggatgtggctggaacagggagggcagaagtgagaatgtgagggggaaaggctgggctggaaagcctggacttgccttcatgtgtctgcctcccttcccaggagaaacagatggagaagcagaggctcttgtaccagcaagcacggctgcacacccggggggcggccgagatggtgctgcagatgatcagtgcctgcaaaggtgcccctcacatgtgcactggactcttccgagtgcactcatcctaacctcactcctcctggctcgcccattccctgtggacccatttgccgcccctcaatgcctgtggtttgcacgcacaccccagcccttgcagcttccccttgtatacctgccttgcaatttctcactcatccttcaatcacgatcacccctgcatgcacaccttggcacactcttaaatccccttctctcacatcccttgggatggctgttttctggtgggtggaacacactgccttccaactgggtggaccatcttttttctcccactccctccaggagagacaggtgccatggtgtcctccaccctgaagctgggcatctccatcctcaatggaggcaatgctgaggtccagcaggtaacagaggcaaagggacttcagaagaaggcaaggagggatgagaggttcctgtgtgactcccagtttctcctcccctgcctcgccctctgcagaaaatgctggattatcttaaggacaagaaggaagttggcttcttccagagtatccaggcactgatgcaaacatgcaggtaggttcgagtggacctcttcttgttaagctgtgtttggtgccactgccaccccactcctggtaccatttccagttctgattctgctctttcagtccagggaaagagactcactcagaatcgctcaaataacagggaatttattataagaattaatgtagaacaataagggaggcaaaatgtcatagacttgaagaatgagttgcattatgaattccagacagtggaaccaaaaacttgagaatttaaggggaacttggcagtgggagatttaggagctctctgatgatcccaattaatctgcctctactgttgtctgcctttattcacctcttgctgccggctgatttttcctaccctctgcagcttttgctaaatgggtggtttctggttcctcattatttcagcttgcgcatggttcatcctggcccaaccatatgtcctagcttctgccaactcttcatttctgcttcctcttgatttcagcgcatagatggtttactgtggctctccaggctaccatggtggggagctgccaggccctgggagagaggagggcagaggcttcatcacataccccctatctttcctttcttttcctcagcgtcctggatctcaatgcctttgagagacagaacaaggccgaggggctgggcatggtgaatgaggatggcactggtgaggccctcccttgggcttcccaccccctgagacatcttcctttgggattcctcccaccccacccccacccgccattgcccagagctcccttcctccaagacactggttcccaagggctccctcgggtccctccctctgctgtggtcccccagtcccaccccctccatccccctggggtctccctccccatgtccaccacccacctccgcccccccccgccaccagaagtcattctgtcttgtgttctcacccatcactacatggaccccaccctccacgtgccccaaatgtcacgccctggttgctgttctcttattaatgtccctaatccgggttaatcgcgtctcctctttgccgtgttgtgacgtgtctaacctttctacccggatcctcgctcctgcctttctacctctatgtcttcatctctctctctccctctccatcctcttctttcattccctctgcttttaccctcatttcctaccctcttccctgctaatccatttccttctgtctccttatcactctgcctttctctctgtgggttgttcctctctctctgtgtgtctttctgtgtctctgtccctgactgtcattgtgtgtgtttgcggtctgtctccctctctttttctctcttttctcctgcttcctcctcccatcctgttggctgccccagtcatcaatcgccagaacggtaattcccccagcccacccccgtgctgtgctgctgtcacccacccctcctaaccccgtccacccctccacctaggggctgaggatctgggacgtggaggggagggagggacccttcagcaggtgcaccctgccagtgcaaaacctggagatcaggagtctggggagcatgattcaggtcccagatcagccactgagaatacatgggcctgtgaacaagtctcttaccttccctaagcttcactttccccatgtgtgaagcagaagctagagaacatggtaaagatctctttccagctggatattgtcggacttccagacccagattcgcagtcccggtgtggagtgatccccactcccacctactctgctctctgcaccccgacctcagattggtcagtcagcgtttcccatccaccaaccgaattggttgcctccggcatccactctgattggtgtgcgcctgcctcctctgcgcctgcctcctctgtgcctgctctggttggcccatttgcggtctagcctcctcccctaccgcccaccatgatttgcttctttcagatgcccattctgattggcccttgtttacacgcctcccctgtgctactcctggattggctgctttcaaggcatctgggccaattggctggctttcaatccccatcccttatccctcccagcccaatcttcccctgcccagagcctttgtgtgaaggtgacccaaacccccataatccattaacctccacggtctgaaggggggctgagggcattaccagctgcctgaatgtctgctaggtcagcagactctcccgaacgtaacacaagtggtgacatcagagggcactgatgtagaaagacacttgaggccccagcttcatgactcagggccccttgggtctccgtctgctgatgtcatgggctctgaggtcaagaccgcctggcgtcatggatgcccatggccctcacagtgtctttggagtggcagctgctcctcccagcacccccatgctttgtgcatgcgtgtgcagtgtgcatgggccttgtgcatgtgtgcgctgtgtcttggcgcatctgacccctcctgggccctgtcccctcccttccacctaggagagaaggtcatggcggatgatgaattcacacaagacctgttccgattcctacaattgctctgtgaggggcacaataatggtgaggaggaggggtgtggggtggaggggaagccgaggtttggggctggtacggaagggttgactgaattagtttccgcccctcctcctcccccggtcaatgatggccactctccagccagtgtcaatccacctagctttcaaaatctctctggaggctgggcgcagtgactcaggcctataatcacagcactttgggaggcaaaggctggtggatctcctgaggtcaggagttcgagaccagcctggccaacatggtgaaaccccgtctctactaaaaatataaaaaaaatagcagggcgtggtggcacatgcttgtagtcccagctactcaggaggctgaggcaggagaatcgcttgaacccatgagatggaggttgcagtgagccaagatcgcaccattgcactccagcctgggcaacagagcaaaactccatctcaaaaaaaaacctcgctggaatttctggaatctagccactttgtttccccctcatctcctctggccagtccaattccccaaaagcaacctgccaaaaaccaatttggccaaaaatcaatttgcccaaatggacaatttgtcacatgctattttcccacaggcgctctgcagtggctgccaaagttctatacacgtggtggatttctgtactttaggtccagaaaagacctaagggaaaaaactgcctggcatttaaaaataaatctattagaatcacttgtttattttgcttataaaatctttgcagaggaaagatctgtacaaaggcctacagattctttcctatcttaagcaagagttttgttttgttgtggttcagccaatttaacaagattgaggatgacagcaaattaattacacaacatcaatgatgagaaatgcagtctcatgcagcaaacctagcttacaactttacagaacagacaaaattctgcacaaaaaacattctacccaatgccatttcctataacaaacatgtacagtctcaagattgtggttataacctttagcaggtgattaggaaaccacagactacccggaaatcaactttcgtgacaagaattggagtaattagtaatcttacttccatagaaccttcacccacttggttagtgctctttaaggtaactgatttgtaaatatctttaatcttcattctttttctttcaacaaaggataaagtatgatctctttgtcttgaattttcaaaagctcttgtgtccacaacgagtttttcaaggtttattaaatacctttgtgccatgggactaagattttttcttttttttttttttttttttagacagagtctcactcttgtcgcccagactggagtgcagtggtgtgatcacagctcgctgcaacctctgcctcctgggctcaagtaatccacccctcagcctcccgagtatccaggactacaggcatgcatcaccatgtctggctaagttttttattttttgtagagatgagatctcactgtgttgcccaggggatctcaaactcctggattcaagcaatcctcctgccttggcctcctaaaatgctgggattacaggtgtgagccaccatacccagccgggactaagattttcattctttaattttaactaagatggaatcagtctttgggtttaaaataaattttattcctcaggaatatgaagttttgaaaatgagaatgttgttatgaaagggattgctgtctcccaacatatttgcaacccagtcctcgcctaaattcatgacctaatcaaatagatatttgaaatatctttcaaatctcagaccccttgcatgtcttgaggagtcagtgctattcaaagcagacaaaaggtttgtctctcacttatttgcacatgtctataacaggtgttgtcagttgccagaattttttttacaggagctgtgtatcttttatttttgcatatagcccaatttaaattaacacaatttaatttaacaatttaaattaacacaaataaaggagttagaaagcagggttgatgggaaaacctgtacctttgcttataaaattttgaatatttgagtatgctttgtctatgtcatgaaactaggcaaaatgggccttctgttgagccaacctgatagagcaattgtgaactgactgtaaaaaagttaaggggaaagaaaaacggggggcaaaaatactttcaggggctgttaaaaccttcctgtgcaacatgatgttgctataaacatttaaaaggacttggctgggcactgtggctcatgcctgtaatcccagcactttaggaggctgaggcaggaggatcacttgagcccagcagttcaagacaagtctgggcaacataaggagaccctgtctctaccaaaaaaaaaaaaaatcatatactacagtataataaacctccaatcatatactacagtataataaacctccaatcatatactacagtataataaacctccaatcatatactacagtataataaacctccaatcatatactacagtataataaacctccaatcatatactacagtataataaacctccaatcatatactacagtgtaataaacctccaatcatatactacagtgtaataaacctccaatcatatactacagtgtaataaatctccaatcatatactacagtgtaataaacctccaatcatatactacagtgtaataaacctccaatcatatactacagtgtaataaacctccaatcatatactacagtgtaataaacctccaatcatatactacagtgtaataaacctccaatcatatactacagtgtaataaacctccaatcatatactacagtgtaataaacctccaatcatatactaaagtgtaataaacctccaatcatatactacagtgtaataaacctccaatcatatactacagtgtaataaacctccaatcatatactacagtgtaataaacctccaatcatatactacagtgtaataaacctccaatcatatactacagtgtaataaacctccaatcatatattacagtataataaacccccaactacccatcactcagctttaacagtttgctttcacagaacaatgttttttaaatagtgggaaccaacccatcagacagacgttcatgaatcagtttcacgcagaggttctcattgtaattgtacactggcatgcctggggagctttaaaagagacttaagcccaggttttgcctttacaggttctaattcaattgatctggggttgggcctgagcactggggtttttaaaagcctcctagttgtcctgatgtgcagccaaggttgagaggatgagaagcacacacttcttcttttgtagttaactagagcagtacaggacagaaaagaacagaatgcatggcacagagtaaggcaatgtgaaacttctctttcgggaataggtgaatataatttcagattgaacacatgtatcaggtctcaatgtaaaaaggatttcctcggctgggtgtggtggcttacacctgtaatcccagcactttgggaggccgaggcaggtggatcacaaggtcaggagttggagaccagcctgtccaatatggtgaaaccctgtctctactaaaaatgcaaaaaaattagccgggcgtggtggcgcatgcctgtaatcccagctactcaggaggctgaggcaggagaattgcttgaacctgggaggcagagtttgcagtgaactgagatcatgccactgcactccagcctgggtgacagagcaagactgtatctcaaaaaaaaaaggatttcctaccatagattgcagtcagaaaagattaaaaaattactgcacaagaatataaacttcacaagggcaggggctggacatacggctcatgtctgtaatcccagcactatgggaggtcaaggtaggagggttgcttgaggccaggagttcgagaccagcctgggctggtctcaacaaaaaaattaaaaattggccggatgtggtggctcacacctatagttccagctacctgggaggctgaggtgggaggaccacttgaacccaggaggtcaaggctgcagtgagctatgatcatgccacagtactccaacctaggcaacagagggagaccttgtcaaaaaaaaaaaaaaatcccccccaaggccggggactgttttttttttttttactactgtatccccagagcctagaatactgcatgacacatagtaagaacgcaacaaatttgttgtagcaaagaggatgtgacaatcttaatctcgtgaggatgtagtatacactcaataaaatatgttgaataaatgaacaagtgaccaatccatatgttccctggcctttagtaggtgctcaataaatatttgttggataaatgcatgaatatccccagcacataggaggaatttgataaaattgtttggaaactaacgaggaactgaatctctatttctccctgctacatagttggtggtcaatatacaaatttgttggaaaaaactgaatgaataaatgacgctccaccacatttgacacatagcaggccctcaataatatttatattttatttttttatatttatttattttttgagacggagtttcactcttgttgcccaagctggagtgcagtggcatgatctaggctcactgcaacctctgccttccgggttcaagcaattctcctgcctcagcctcccaggtagctgggattacaggcacatgccaccacacctggctaattttgtattttttttagtagagacgggatttcaccatgttggccaggctggtctcaaactcctgacctcaagtgatccacccacctgggcctcccaaagtgctgggattacaggtgtgagccaccgctcccagcctattttaaaattatttatttatttatttatttatttttgagacggggtttccatcttgttgcccaggctggactgcaatggtgagatctccactcactgcaacctctgcctccggggttgaagcgattctcctgcctcagcctcccaagtagttaggattgcaggtgcccaccaccacacccagctaatttttgtatttttagtagagacggggtttcaccatgttggtcaggctggtctcaaactcctgacctcaggtgatctgcctgcctgggcctcccaaagtgctggaattacaggcgtgagccacccggccagtatttttagacaaatgaataaatgatcatccatctttctctgtcacatagtaagtacttgatagttattaaataaattgatgatgatatgctttctggcatacaataggaactcaacacatgagtattgcataaatgaataaatgacccactgttcatctcccctagcacatgggaggtgctggataaatgacttttcatctccccagatttccagaactacctacggacacagacagggaacacgaccactattaacatcatcatttgcactgtggactacctcctgcggctgcaggtgaggacgtgagacggttcaggtgtgacttgggtcgggggctgcagggccatggtcggccccagcaccccctcacaccctacccgcccccaccaggaatccatcagcgacttctactggtactactcgggcaaggatgtcattgaagagcagggcaagaggaacttctccaaagccatgtcggtggctaagcaggtgttcaacagcctcactgagtacatccaggtagggcgctccccctggggcgggagtgggaagggagggggtcccgcatcgtgatccctgatcccttctcggggattcccttcccccccacacggcactctgcctcccagggtccctgcaccgggaaccagcagagcctggcgcacagtcgcctatgggacgcagtggtgggattcctgcacgtgttcgcccacatgatgatgaagctcgctcaggttcgagcccctctggtctccatccacctgcttccgggcgtcccccaagtggtccatttccaagtcttgcccctttggtcagtttgtcacccgagtgctcccggcatgttccagactggttccctctcagtggccaaatccatcctctttctggattggctgtctgcatgaccccgcctcctcctctgcccctccctccccaccaatcagctggttttccatccacgcttccattggtctgacgtgttggccccgtcccaatggccggagctcctctatgattgattgctgtttttctctctgatgagtcatcgcagatgtggacagtccttgggctaggatggggctggtttctagattagagcctggggctgaggaaatgttttgcttctttatcttacttgcggcagatgacacccatatcaggcattcatgatgtaaggtccctgttgagcaccaccttccatttccataatccttgttcctctttccctcacccctttgcagccttgccaatgtctcacgaacacttaatccatttgctctgcttctgtctggtaactatattcaaggctgccatatactgttccgcaggtcgtgcactgcacaaaggcacgatctctgagagcattcacatcctacacataatggtgtatttattacaatagtttagttttccagcagatggcagtaaagcatccagcatgttataacttccctacaggaagtgttttaggggacgcctttttttctaatttgctcaaaggtgccccaggggctggcagaaaccctaattcgttgtcatctgactttttaaaaggagttaaacttagaatgcaattcctccgtgtcacagcagctgaagttgtgctgttggtatcctaaaattctagagagtgttggtatcatcatgtagaattccaaatcctgcagggctaattcatccgccaccatctagtctaggttgcaaaagctagaaatccagtgcaaagtggtggcttaagaaaaataaagaatttatcagttcatattacagatccagggcttagagtgatgtcagcagaactgcctcctctttgactgcatttgcaagcaggctgtctccctgggctggaaaaaatggtgcctcaggctcctatccactctacttcttaacagccctagagggaagagatctcctctttcctgaaagctccaagaaaaaaaaaaacctgagattctctctgactagcctattgggtcacatgtccctccctgaaccaatcatcataggcttaggaaagaaagctttgactgaccaggcccggtcatatacccacctatagaaccaggaggtagggttagccccatgtgctctgactgtgggatgggggactccgcaggtgaaaattgagggattgtaaagagaggagggggactgaatcatgggtaggcacaaaccacaggcgcccacccactgtaagatcttgagattaggagtgtcgggaccttaggcgcagaatgcagagctttggaactgtggaaatacattaggattggaatcaacaactgatagaactagcatgggagcaaaagatccttacatcccatttatctggtatcatctcctcccctctccattttatttggtggaaccatatgaaattaccactttggatctggcacggtggctcatacctgtaatcccagcactctgggagccctaggcgggcagatcacctgaggtcaggagttcgagaccagcctcaccaacatggagaaaccccatctctgttaaaagtaaaaaattagctgggtatggtggcgcatgcctgtaatccagctactcgagaggcttaggcaggggaattgcttgaacctgggaggcagaagttgcagtgagccgagattgcgccattacattccggcctgggcaacaagagcaaaactctgtctcaaaaagaaagaaattaccactttgtgagccaaaagtgatcacatgttggcaattttatgtgactcaacctaacataaataggggccatgaggcaaaactttgtattggaggtttctatgggccctacactgtggccctatgttccccgcagacggcttaccagaaagcacatggctgtctctgcagccttcctcctgaacccagagtcccactcttgccatcacacattatattcaacatacatctgtcaatcccaccgtaggccaggcacagtgctgggctcacatcccttcctagacctgggtctctgtccccagtgtttgtctctgtctgtctctgtctctctctgccccaaatgtctgccccgcaagcctctcagtcctccttgtctgccagccttcccactacccatcacctatcgagcccgtcccccaagtgccaaccccacccccacaatcttgtctctctgccccttcccctgcttccgaggaacatgtctggactcgggtcccctcggaggtaagaggggagaaaacgggtttaggccctgctgggtaggtgaggagggggagaagcaacagaggtgggggaggtgtatgctgagaccagccctcaccgagctgggatctctaggactcaagccagatcgagctgctgaaggagctgctggatctgcagaaggacatggtggtgatgttgctgtcgctactagaaggtaaacacccaggagtgagggtgagggaacagtaaagaggttcagagaagcctgagaatggccccctgagacccgggagaccctaatcctcaaccccatctgacatcgtgtcaggatccatgggttgatgaagaagccataataggccagatgcggtggctacacctgtaatcccagcactttgggaggccgaggtgggaagatcacctgaagtcaggagtttgagaccagcctgggcaacatggtgagaccctgtctctactaaaaatacaaaaattagcctagtgtggtggtgtgtgcctgtagacccagctactcgggaggctgaggtgggaggatcaccagagcccgggaggtccaggctgcagtgagctgtgatcacaccactgcactccagcctgggtgacagagcaagaccctgtctcaaaaaaacaaaccccaaaaacaaaccaaatgtccaaatgtggcaaaagataaacaattgatgaatgtggatatattaggatcccttttttttttttttcttttctgagacggagtctcgctctgccgctcaggctggaggtgcggtggcgcgatctcggctcactgcaagctccgcctcccaggttcacgccattctcctgcttggcctccccggtagctgggactacaggcgcccgccaccacacctggctaatttttttttttttttttttgtatttttagtagagacggggtttcaccatgttggtcaggatggtctggatctcctgacttcgtgatcctcccgcctcagcctcccaaagtgctgggattacagacttgagccactgcgcccagcctacattaaaatttaaaaattacaaaaataaactggagccaagcttcagctgctgcctttagagggagtgtgggatcgcagtttgccaatctctacctctccttgctgcttaccactggctagcctcagtcttctgtggaccctcctgactgtgtgtactggtggaagttttagttgtgtaagccctgaggtcatgcagctctgagttcaaatccattctccccactttactggctatgtaactttgagtgcatgactttctctatgtctcagtttctcttcctaaaagtagagtcacacacttccctttttgtgtgattgtgccagggtagcatttggcacctacctttagcgtacatcatcattatctttttttttttttttgagacagagtctcactccatcacccaggctggagtgcagtggcacgatctcggctctgcaacctccgcctcccaggttcaagcaattctcgtgcctcagcctcccaagtagctggaaatacaagcacatgccaccacgcccagctgattttgtatttttaatagagacggggtttcaccatgttggccaggctggtctcaaactcctggcctcaagtgatccacccacctcggtctcccaaagtgctgggattacaggcgtgagccaccacgtccgacctgacatcattagctttactgggggaggtgggcaaaggcaggatcagccaggttggcacaggaggctgacgcaggtcaggaagggacctgtggaggggaggctgtggctggccagggacactccagcagcgtggtggctcctgggctggaaagagaggcaagcctggtggggccccagaagggagtgttcaccggccacactgacctggggctgcctgcagggaacgtggtgaacggcatgatcgcccggcagatggtggacatgctcgtggaatcctcatccaatgtggagatgatcctcaagttcttcgacatgttcctgaaactcaaggacattgtgggctctgaagccttccaggactacgtaacggatccccgtggcctcatctccaagaaggacttccagaaggtgggtgtgggacatcgtgtgggcccaggacttgggtggggttgccaagggccagccatacccttctggctggctgcctcaggcaagagacatctctgcaagcctcactttccttgtttgtaaaatgaggataaaacagtccttgggttatatgtattctgttttatttcattttagagacaaggtctttctctgttgcccaggctggagtgcagtggcgtgatcatagctcactgcagccttgacctcctggcttaagcaatcctcccacctcagcctcctgagtagttgggacgacgggtgtgtgacatcatgcctggctaatttttaagtttattttttgtagagatgtggtctcactacattacccaggctcctcttgaactcttgggctccaacaattctcctaccttggcctcccaaagtgctgggattataggcatgagccacctcgctcagcccccttgggttattttgaggatgaaatgcattaacacagatgagaaccgttattactgttatctttattgatagtcataacattatcattattgtgaataggcatcagttattccatcaataaacattggctggctttcttctctgtgtagggcctgtagtgacactattgacgcatcaatgaccaagatagacacagcccgtgctttcatgggtttatagtctaatgggggaggcagtcactaactagaccattccaagtctaaataatgagcctgctaggagggaagtgctggaacatccttattcagaaacccactcctcctcctctaaccacctctcccatcctaactctccatcttttcttctgagcctcagtttcctactctgtaaaatggggataggataatcacattaaccactaactattggcagtgtgcggtggttcatgcctataatcccagcaatttgggaggccgaggtgggaggatcgcttgagcccaagagttcgagatcagcctgggcaacctagtgaaaccctgtatctataaaaataaaaataaaacaactattaactattgtgaggatgggcagtgcgggcagtacctggaatatggtgagtcctcaagagatgttagctgctattactactccctgatctttaatgttaccattttgttaactttttattttgaaataacttcaggtttatagagacgttgcaagaacagcacatagaatttctgaatacctttcacccacattgcccaaatgttttctatttactatttactccatcatgatttccctttcctttccttttttttttttttttttttttttgagacggagttttgctcttgttgcccaggctggagtgcagtggtgcaatctcagctcagtgcaacctccgcctcctgggttcaagcgattctcctgcctcagcctcctgagtagctgggattacaggcacgcaccaccatgcccagctaaatttgtgtgtgtgtgtgtgtgtgtgtgtgtgtgtgtgtgtgtgtgtgtgtgtgttgtatttttagtagagatgggatttcaccatgttggccaggctggtcttgaactcctggcctcaagtgatctgcctgcctcggcctcccaaagtgctgggattacaagcatgaaccacctcgcctagccaatttccctttactttgaaacacttcagcgtgtatctcctgagaacaaattcattctcctacctaagcacaggacaattatgctaatcaggaaattaacattggcacaatgctgctatctaatcctagaccttattcagtttcccttgttgaataaatttctttcgtcaatgtcttttctttgccaacccagaaccagggattgtatttaggtgttctgtctgttttcctccttcagtctggaactgtgcctgggtctgtctttatctttcctgacatgtttgaagaacgcaggcaaactgttttgtaaaatgtcgttcagtgtgggtttgtctgagttttcatcattatcagactagggttatgcatcttttgcaggaatatcagagaagtgatgtgtcctcagtgtaatgtattaggaggcacatgtggtttcatcccattactgtttattttcttatttatttgtttttagagtcagagtcttgctctattgccccggctggagtgcagtcaaacaatcctagctcactgcatccttgaccccctgggctcaggcgatcctcctgcctcagccacccaaagtgctgggattacaggtgtgagtcactgcacctggccaatgtctcttcccattactgttgttaacttggatggcttggttaactcggtgttcaccaggggctccacaatgaagttactgttattccctttggaatcaataagtgtctcatgaggatatactttgaggctatgtaaatattctgctaactctggggtcatcatccattgatgattcttgcctgaaacaattattcctctagtagctgacaaatggtggttttctcatttcgccgtatgctttaccatcactaggcaccattttactgtaagaaagagtgtttccttcttgtccatttcatttcattttctcattcatccattcatttatatcagtgtggattcacggctttttttttttttttttttttttttttttttttttttttgagacggagttttgctcttgttgcccaggctggagtgcaatggtatgatcttggctcactgcaacctccgcctcctgggttcagtgattcttctgcctcagcctcccaagtcgctgggattacaggtatgcaccaccatgcctggctaattttgtatttttagtagagacgggggtttcaccatgttggtcaggctggtctcgaactcccgacctcaagtgatggtcaggctggtttcaaattcccaacctcaagtgatccgcccgcctcagcctcccagagtgctgggattacaggtgtgagccactgcacctggcccatggcttcttagtctatgggttgcagctgtgactggccatctgcacttaggtaagctcagggttccctgagttaaaatcaaagtgccccatgccttccagttgtcccccaagagcctcactgtgtctctctgcttctcagccacgccttgcaagagtcatctgcccttgatcatctgttctcacctcccactccttccctgattcggggcttgccggcttccgtccctgtcaggctcctgaaactcctctgaccaagatcatcagtgacctctttacctctgactgtcccctctgacttgtcatcttggcagcctttgtcacagctggccttttcgtttccctccccaaccctgaggggcaatgcctgcttccctgaacctgagcctcacatccttcggaccctgcctcccagctgatccctcctagcctcttacccttcactgtgcctgagccctccaccttcatgaagagctcatagttaccatattctcactctgtgccctgcgtataaatgaatttgctcatttagtccttacagcaaccctacatggtaaaacatttttgttttgttttgcttctttgagacagggtcttgctttatcagtcagtctggagtgcagtggcgtgatcacaactcactgtagcctccacctcccaggctcaggtgatcctcctaccttagcctcccaagtaactgggactccaggtgtgtgccaccacacccggctacttttatttatttatttattttagagacggggtttgacatgttgccctagctggtcttgaactccaggactgaagcaatcagcccacctcaggctcccaaagtgctgggattaccagcataagctaccatgcccagcaggactgcttttttttttttgagatggaggagtctcactctgtcaccaggctggagtgcagtgatgtgatctcggctcactgcaaactccgcttcctgggttcaagcgattcttctgccttagcttcccgagtagctggactacaggcatgcgccaccacacccagctaatttttgtatttttagtagagacgggcttcaccatgttggccaaggtggtctcgatctcctgacctcatgatccacctgcctcggcctcccaaagtgctgggattacaggcgtgagccaccgcgcctggccaggattgctttttattcccattttatggatgtggaaactgaggcacagggagattaaacggacatgcttaaggtcacccatcttaataagtgacaaggttagggttagacctcaggcggtctggcctcagagtacactgccttcagattcatctgttaatctggtctaatcgatagtcagtgagcacttcctgggggctgggccctggctgggggtctcagccctactctcgagcctggcaggtttagggagagagtctggggtggctacaagagaagcaaaaagcatttgcaggagctaaagtacacatgattcacaattgaaaatgagtaatgatctctcctgactggggctgcacagatcacagggtttaatgtcacctacctgacattttacagctcaacatctgttacacaaagttataatctgcaactgggaaaagtgtattcattttattttttgaatatataattactcacgattttaaaaatcaaaatataggctgggcacagtggctcacgcctgtaatctcaacactttgggaggccaaggcaggcagatcacttgaggtcagaagttcaagaccagcctgggcaacatggcgaacctccccatctctactaaaaatacagaaattagccaagcatggtggcaggtgcctgtaatcccggctactcaggaggctaaggcaggagaatcccttgagcctgggaggcagagattgcagtgagctgagatcacgccactgcactccagcctgggtgacagagtgtgactccatatcaaaaaaaaaaaaaaaaaaatcaaaatatagccaggtgctgtggctcacaccagtaattccagcactttaggaggccaaggcaggaggattgcttgaggccaggagttcaagaccagcctggacaatatagcaagaccccattgctaaaaaaaaaaaaatcaaaaaattagctggatgtggaggtgtgcacctgtagtcccagctcctctggaggctgactgagctgggaggatcctttgagcccagaaggtcaaggctgcagtgaaccatgattgtaccactgcactccagcctgggcaacagagcacaagactttgtctcaaaaaaacatttatcaaaatacagcaaggcgtgaagtgagaagtcttactcctgctcttttccaatccactcttccccacatctaccatggtaaagccctttcgttagtttcttttgtatccttccatcattttttaaatgaaaatacaaacagatatttttgtttttctcgttttgtacataataggtataacatcactggtctgcattatttaataacatattctggagatataggaagtgtcgtcattcttttttacaggtgtccaatattccacgctgtgtgtatattatggtttatttgctattccttgttgatggacactggctttattcccaatgttttgctatacaacccatgttgcagtcagggctgtcatggatagttgcacccattgtgcactgcacaaggatgtcatttataccacagacattttacatttgtacatgttttactgcagagttccagcagatggagggaaatgtgctgaggaaggctgtagtatttgggcctaaagcaatgctggctataacaattactcttgctacactttgagaggctgaggcatgtggatcacctgaggtcaggagttcgagaccagcctgaccaacacggtgaaaccccatctctactaaaaatacgaaaaaatagcgggcatggtggcatgcacctgtaatcccagctgcttgggaggctgaggcagagaattgcttgaacccgggagttagaggttgcagtgagctgagattgcgccactgcactcctgcctgggcgacagaacaagactcagtctcaaaagaaaaaaaaaataagtagcattgttctataatttcccaagttcttcatggttgccagagttcttgacagtttacaaatcacatcttcattgatgaagtactttgtagatttcaaaacatctactatagcttggaaggccctttctggtgtttgaaatcacattttatttatttatttatttaaatgtttaattatattaacagagatgaggtctccctatgttgcccaggctggtcttgaactcctgggtttaagggatcctcctgcctcagcctcccaaagcgctgggattacaggaatgagtcacctcacccaacagaaaccacattttaggttactgatttattcctggtcagtaaacagtcttgaggttatcttcattgttttcctatctgcaaattttatttgtctcttaattaaaacacttcctttttaaagtgtctttactgaaatagaatgtacataccataaaatccacccatttaaaatgtacagttcagtggtttatagtgtgttcacagaattatgaagccatccctgcaatctaattttagaacattttaatcatcctttgaaaacgaaccccatacccattagcagtcatttcccacttcccccaccccagcccccggtaaccactgatctttctgcctctatagatttgcctattctgaacactgcatataaatggtatcataaaatatatatggtcttggccagacacggtgggtcacgcctgtaatcccagtactttgggaggtccaagagagtggactgtttgagtccaggtgtttgagaagagcctgggcaacatggcgaaaccctgtctccactaaaaatacaaaaaattagccgagtgtggtggcacatgcctgtagtcctagctacttgcgaggctgaggtgggaggaccgagaagttgaggtcgcagtgagtcctgaacacaccactgcactccactccagcctgagcaacagagtgagaccctgcctcaaaaaaaaaaaaaaaaaaatgcatgtgtgtgtgcgcacgtgtgtgtgtatgtgtgtgtggccttaaaagacgttccttttatttaacaaaccacaatgtcatcactcctaacccaaaataaaacagtacaaataaaaaagtcacagtcctttaaatcatcaaatatctagtgagtgtgcaaatttccaaatctcataactttcatgtaactatcaggattttttgtagcttctttaaatcagaatccaaacaagggccacccattgcaattggctgatactttttaaaatcatctttcatctcttgcttcccctctattatcttttctttttccttgcaatttatctcctggagatccagtcctgcagatctttactgtccaacagaaatacaatatgagcaatatgtatatttttaaattttcttcttttttttgagacagggtctcactctgttgtccaggctggagtgcagtggggcaatctcagctcactgtaacctccacctgtcaggttcaagtgattctcctgcctcagcctcctgagtagctgggattacaggcatgcgccaccacacctggctaatttttgtatttttagtagagacaaggtttcgccatgttggccagggtagtctcaaactcctggcctaaagtgatctgccctcctcaccctccgaaagtgctgggattacaggcgtgagtcaccataattttaaattttctaatagccatgttttttaaaaagtaaaaagaggaccggcatggtggctcgtgcctgtaatcccagcactttgggaggccaaggcgggaggatcacttgaggccaggagtttgagccagcctgcgtaacacagcaaaaccctatctctataaaaactttaaaaaataaccaggtgtagtagtgcatatctgtagtcccagttactggggaggctgaggcaggaggatctcttgaaccttggaggttaatgctgcagtgagccatgttcatggcactgtacttcaacctgggcaactgagcaagactctgttaaaaaaaaaaaaaagtaaaatgaaacactacacataatctagtacactcaggatattatttcaacatggaatcaatcctgtttatttatttatagagatggggtcttgccatgttgcccaggctggtctcaaactcctgtgctcaagcaatccaccctcctcagccacccaaggtgctgggattacaggcaagagccactgtgcctggccataatcaatctaaaaaatgattagctcgacatttttcattcttttttcacactaagtctatcagtggatagtgctgtcctagttgtagagcttcccatagtctggacctgaccaatgcgtccttgtggtgtcatttcatgtgttcctgtgtcccctgggtttcctccaaagtgggactcagccaaagttcgagcagattcagatttgggtgtaaggagttttttagccagaaccttcctatgtggggctactgtatacctccaccaggaggcacctcctttccagatgccagcagctgtttctgctcaacactcagacatattcattcattagagattgcaaaatggcgatagtctcatttcttttttttttttttttttttgtgacagagtctcattctgtcacccaggctggagtgcagtggcatgctctcggctcactgcaacctccgcctcccaggttcaagcgattctcctgcctcagcctcccaaagtgctgggattataggcatgagccacggcgcccagcctcttagttttcatgatgcttccttcacttgacaaatgagtatgagtacctactgtgtgtcaggcactgccctggtcctgaaggtacagcagtgaacaaaacagagagcccactgtgggggctgatagtccagtgggaaggggcagatgcaaataacgaaatacacgaagtaattgcaggttataatctgtggtctgaagggtgtgggagtgagcagggtgtggtaagccctgtaaaccggctggtggcggaaggccttctgcaggaggggacagcgaagctgagagttgaaagataccatatgactcagcgaggctgtggtgtcccaggcaaaggggacagtaaatggaaaggctgaaaaatgggaacaagagggacagagagcagcctgggcaacatggcgaaaccaaaccctgtccctacaaaaaatacaaaaattagctaggcatggtggcctatgcctgaagtcccagctacttgggaggctgaggcaagagaatcacttgaacccaggagggggaggttgctgtgagccaagatcgcgtcattgcactccagcctgggtgacaagagcgaaattctgtctcaaaaaaaagaaataaaaatacaaaaattagctaggcatggtggtgcatgcctgtattcccagctactcgggaggctgaggcaggagaatcgcttgaacccgggaggcggaggttgcagtgagccgagattgcaccactgcactccagcatgggcaacagagtgagactctctcaaaaataaaataaaataatacaataaaatataaaataaaataaaatactagccaggcacgatgactcatgcctgtaatctcgatactttgggaggctgaggtgggaggatcgcttgagcccaggagttcaagaccagcctagaaaacataatgagaccttgtctctacaaaaaaactgtttaaaaaattagctgggtatggtggtgcatgcctgtggtcccaacttggaaggctaagacgggaggatcacttgagcccaggaggtcgaggctatggcaagccatgatcactccattacactccagcctaggtagtagagacagactttgtctcaaaaaattaataataaagtaaaacaactaaaagactataagtagactgtaacacaaagaaaggataaatgccagagggaatggataacgcattaaccctgatgtgagtacgtattgcatgcctatatcaaaatagttcatctaccccataaataaatacaactactatgtacccacaaaaatgaaaaataaaaaggcctggctcatgcctgtaatcctaacactttgggaggccaaggcgggcagatcacttgagatcaggagttcaagaccagcctggccaacatggcgaaaccccatctctactaaaaatacaaaaattagcttggcgtggtagcacatgcctgtaatctcagctactcagaagactgaggcaggagaatcgcttgaaccctggaggcagaggtttcagtgagccaagatcacgccactgcactccagcctgggtgacagagcaagactctgtctcaaaaaataaaaataattttttaaaaaaatagtccaggtgtggtggctcacacctgtaatcctagcactttgggaggcccaggcaggcagatcacctgaggtcaggagttcaaggccagcctggccaacatggcgaaaccctgtctctactaaaaatacagaattagccagtgtggtggcacacgcctgtagtcccagctactcaggaggctgagacaggagaatcacttgaacccaggaggcggaggctgcagtgagccaagatcgtgccactgcactctagcctgggcaagacagagcaagactccgtctcaataagtaagtaagtaaataaataaataaagggatgggcaatgaatgatgacacagagagatcagcaaatcacaagagcaaagtctaggagtgaatggaggtgatagtgtcccaggcgcctgtggagaggtgggcttctttttttttttttttttttttttgagacagggtctcgctcttattgcccaggctaggtgcaatggcacaatcttggctcactgcaacatccgcctcccaggttcaagccattctcctgcttcagcctctcaagtagctgggattacaggcacgcaccatcatgcctaactaatttttgtatttttagtagagacggggtttcaccatgttgtccaggctggtctcgaactcctgacctcaggtgatccacccgcctcggcctcccaaagtcctgggattacaggcatgagccaccacacctggccagaggtggatttttgagacagacagtgtcacactgctcatgatagaggggtaggcaagcagacgaggtgagggcagaaggtgaggggttccggtgtgattatgtctccatgctctgtggtttctagagcccttcatgatttgcaaagcatgttactcatttagaaagcattttgcaaagttctggggtttttacaaagcacttttgagagccagaaaattttgcttctgttcataccccagagcaacatttctcacactgcatgttgctacccgtctggaggtaatgaaattaatttagcaatgcgtaactcgtgaccagcatctttagaaataaaatagaacactgcagagtgtgctacacagcaaaggtcagaattatgtcatgaaacctttttttttttttttgagtcacattgtaaaatgtattcttatggttgagtgagtgcggtcaagaacattttatgctgctctagagaacctcttgcaaaaatgcatgggcaatcagcacaagaatgttcaagaaaagtgttgtctgaaagaaatctgtgggtgaacttggtgatttatgcttgtaatcccaacactttgggaggcggaggagggcaaatcacctgagttcaggagtttgggacaagcctgggcaacatggcaaaaccccgtctacaaaaaaatacaaaaattcaccaggcacagtggcatgcacctgtagtcctagctactcaggaggctgaagcacgagactcatttgaccctgggaggtggaggctgcaatgagctgagatcgtgccactgcaccactccagcctgggtgaaagagtgagaccctgtctcagaaaaaaaaaacaaaaacaaaatacaaatctggaagcaacctacatttccattagcaggataacagataaagagtgttatggctgggcgcggtggcacacacctgtcacccctgcactttgggaggccgaggcgggtggatcacctgaggacaggagttcgagaccagcctggccaacatgatgaaaccctatctcactaaaaatacaaaaaattagccaggtgtggtggcgggcacctgtaatcccagctgctcaggaggctgaggcaggagaatcacttgaccctgggaggtggaggttgcagtgagctgagatcatgccactgcactccagcctgggcgacaagagcgaaactccgtctcaaaaaaaaaaaaaaaaaaaaagagaaagaaaaagaaaaaaaagcaagtttcagctgaggtgggaggatcccttgagcccaggagtttgagaccagccttggcaacatagggagaccttatctctacaaaaaaaaattaaaattaaaattagccaggtgtagcggtgtgtgcctgtagtcccagctgctctggatgctgggtacttgagcccgggggtggggatggggacgagaggggatgtcttgaggctgggttgagctgtgattgcgccactgcactccagcctgggcgacacagcgagaccttgtcttaaaaaaaaaaaaaaaaagagagagaattgaggctctccaggtcaccccactgacctccctgcccgcccccaggccatggacagccagaagcagttcagcggtccagaaatccagttcctgctttcgtgctccgaagcggatgagaacgaaatgatcaactgcgaagagttcgccaaccgcttccaggagccagcacgcgacatcggcttcaacgtggcggtgctgctgaccaacctgtcggagcatgtgccgcatgaccctcgcctgcacaacttcctggagctggccgagagcatccttgagtacttccgcccctacctgggccgcatcgagatcatgggcgcgtcacgccgcatcgagcgcatctacttcgagatctcagagaccaaccgcgcccagtgggagatgccccaggtcagggaacccgcgcgcgtgcaagctcgcctcctggggcttcgggcatgcgggtgctcacttcctgcaccctcagaccccacgggggctgtgcgtgcctcgcatatctgccctgctccggcaagcccacgcccacccttttgtacacatttcgtccagctgcgcccttgcacatccctggctcgcccctggccacttcttgcggacctggcccacacaaggatgcacaccccttgggcatgaagcagggtcagtgtgtcctgactgtggctgctcacacgccatgctttccccttacacccacaccctgggagctctggcaggcccttatagccctgatgcagccctacccacactctcacctcctcgaacctgcatggcgacacaccccttgctcaccttcccagtagcccccggcgtgccgtctcttggtcctggcccgctcatgctcactcttgtacacgctcgccttgggggctctggggtgccctggcatgctgacccacccttcaccagtcatcacgtttgcccccagatgccttctgaagtcctagcatatgtgtaccccaacttattctgggcccacacgtgggtgcacacctcttgcacacacaccctgaggatgccaatgagccctctcagaaccctggcatgcttcatttgttcactgtccacttgccctcactgtagccctggcacaaccatgctcacccatgcacacttgggccacggtctcaggctcacccagaagagccctcagacctactctctaatctgacatgccctatctcagctcctcctatgcccagcccacaaatgcttgaacatccctcacacactcgcttgccccaagggtacactcacgtggtcccggcatgtccccagcagagctggcacacctggctgacatatggttcccctccccattccctcacactccccacacgcccctgacacaccctcacctcattctcttgcacacacacttgcttgttgttcctcagatgccgccaggtacttgcacaccccttcttgtctcacacacatagcccgggaggtttgcgcacccgtcacctccttcatgagtgggcccttcatatgtctcctcaggggacaccagctcatgcacgcgggctcatgtcccacacagagccctgtcctcatgttctgggagccagtacacaaacccttggctccccttcccacattcatgcctgcctcacgcacactgcataactgcaggcccctctcacactcatactcctcctgtccccccacagagtcccaggcccttgcacacctgccccgtgtgcccacgtccaccgtgcacactgagcctctcgtggttgcacacttttggcatcttcccatgccgccacgccctccttactcctgatccctccctggcccccggtgtctcctcacatactccgcaggaacccttgagatcttgcacactcatctgtgcccctcggggccccactgcatacacacccccatctggcacacaagtggttgcagcatcctggcacccaggatgtccacacatccctgcctctgcaggaagcccctgttcaccacggcccttcccactcattctttgcacgtgctgggggagctctgccctcctctcttcctctgaccctgcgtgctccccatacaaacactctttgccttagtgctattcctccaaacacccgcttccttctgctcaccccttcccattccactttcccctgcttctcaggcatccacgtatgcccatgtggccttggagcacctgtggggcagtataataataggtaacactacggtgttgttgttgtttgagacagagtttcgctcttgttgaccaggctggagtgcaatggcacgatctcagctcactcaacctccacctcctgggttcaagcggttttcctgtctcagcctcctgagtagctgagattacagccatgtgcaaccatgcccacctaatttttatattttcagtagaggcggggttttgccatgttggcaaggctggtcttgaactcctgacctcaggtgatccgcccgcctcggcctcccaaagtgttgggattacaggtgtgcgccaccgtggcctgcccactatacagcatttatcaggcaccgggcgctgttctaatcatgcagcatctattaactcatttaaccctcacaccaaccctataatgtaggtcctattatgcccattttacagaggggaaaacggaggtccagagagttaattcaaaatcacccagctactcagtggcagaatcaggatttgaacccaggcaggctggctgcagagcctttgcctttaagcactatgctcctcctctcaaggaagctaaacacatccattctggagccagctctctgggggttcgaatcctatatgtgccaccttgtctgtgtcacctgggcatgtaactttctgggcctccctgtcctcatctataaaatgggaagaaaacccgctagccctaggcttgtttgtgaggattaaatgagttttatggaaactgcttgtatggggcctggccttattgaagcatttacaggagtacccacagtgagtgctctctataaagctctctctataggtttgctattgataatcaaaacaacaacttggccaggcgctgtggctcctgcctgtaatcccagcactttgggaggccaaggccagaggattgctcgaggccaggagttcgacaccagcctgaccaacacagacagaccctgtctctgcaaaaaaattttttttagaaattagcaggccagtcatggtggcttatgcctgtaatcccagcactttgggagggtgaggcgggcagatcacttgaggccaggagttccagatcagcctggccaacatggcaaaaccctgtctctactgaaaattcaaaaactcagcccagcatggtggcaggcgcctgtaatcccagctactcaggaggccgaggcatggggatcatgtgaaccctggggacgaaggttacagtgagacagcgtcacttcattccagcctaggagacagagctagatcttgtctttttttttttttttcttgagacagactttcactctgttgcccaggctggagtgcagtggcacgatcacagctcatggcaacctccgcctcccgggttcaagttattctcctacctcagcctcccgagtaacggattacaggggtgcgccaccacaccggctaatttttgcatttttagtagagacgggggtttcaccatgttggccaggctggtctcgaactcctgaccccaagtgatctgccagcctcagtttcccaaagtgctatgattacaggcggagccaccgcgcccagcctgaccctgtctcaaaaacaaaataccaacaatgcatttagaacagcgcctgccgcggtgaccccttgtagctgccactgcgctgtcgctgctgtccgagcccccgctgacggcgccctatcctgtctgccgcccctcgcttcaggtgaaggagtccaagcgccagttcatcttcgacgtggtgaacgagggcggcgaggctgagaagatggagctcttcgtgagtttctgcgaggacaccatcttcgagatgcagatcgccgcgcagatctcggagcccgagggcgagccggagaccgacgaggacgagggcgcgggcgcggcggaggcgggcgcggaaggcgcggaggagggcgcggcggggctcgagggcacggcggccacggcggcggcgggggcgacggcgcgggttgtggcggccgcaggccgggccctgcgaggcctcagctaccgcagcctgcggcggcgcgtgcggcggctgcggcggcttacggcccgcgaggcggccaccgcagtggcggcgctgctctgggcagcagtgacgcgcgctggggccgctggcgcgggggcggcggcgggcgcgctgggcctgctctggggctcgctgttcggcggcggcctggtggagggcgccaagaaggtgacggtgaccgagctcctggcaggcatgcccgaccccaccagcgacgaggtgcacggcgagcagccggccgggccgggcggagacgcagacggcgagggtgccagcgagggcgctggagacgccgcggagggcgctggagacgaggaggaggcggtgcacgaggccgggccgggcggtgccgacggggcggtggccgtgaccgatgggggccccttccggcccgaaggggctggcggtctcggggacatgggggacacgacgcctgcggaaccgcccacacccgagggctctcccatcctcaagaggaaattgggggtgagagagcaggcggggttttggggttttggaaagatgggggattggagggaggaagagagcccggctgggtggagacacacacagaggagagaactggctagggggatgggcacacgcacccacggaggacgcacccatggaggacgcacacggggacagcgggcgccgggcaagagagacgctcagagacagagggatactcagacccacagagaaagagactcagagatggagacctggagaaagggccggggagagagagtgcagggccggacagagtgcagggccggacagagtgcagggcccggagaggtagagaaaatgatacctgcagagccagagagagtaagaaacccagagaccaaattagagggcaggaaagaccaaaactaagccaggcgcggtggcttacacctgtgatcccagcactttgggaggccgaggcgggccgatcacctgaggtcaggagtttgagaccatcctggccaccgtggtggaaccccgtctctactaaaaatataaaaattagccgggcatggtggtgtgcgcctgtaatcccagctactcgggaggctgaggcaggagaatcgcttgaacccgggaggcagaggttgcagtgagccaagatggtgccactgcactccagcctgggcgacagagcgagactctgtctcaaaaaaaaaaaaaaaaaaaaaaaaaaaaaggaaaagaaagaccaagactaaaaaaagtcccgagacagggtcagggccactaggaaaagaccctcggagatactcgttgtgggaatgaagtacaccgtggaggaagggaccccaaacatcctcaggcccttggtgctgggaatgccttgggaatgtggaggtcaaggtggtgggaagccctggggacaagcagagctgcacttggagtcagcccgaccctgcgcagtgctttgggcaaagggcttcacctcgatgagcctcagtttcccctctgtaaaacgggaatcataatctgcctctttctggtggagggaagtgtaaaacttagattacccaggggaaataagagagaaaggagatgagaggagcaggcaggcagcctgagaagcgcttagggtgaggactcagccctgatgcttgccctgtccctaggtggatggagtggaggaggagctcccgccagagccagagcccgagccggaaccagagctggagccggagaaagccgagtgagtggccttggggctgaggggcctagcccctatcactgcctccctcctagagtaggagcctccagaggtcaggccccaaggctgtcctggccaccctgtgtcctcggcatcacccagcccagactcaggcacggaggaggggctctgagtaaaagaatcaagaaataaatgctccaacctgggcaacataaaaaaaaaattaaaattagccaagcatggtggtgtgtggggaggctgaggtgggaggatcacttgacccctggaggtggaggctgcagtgagccctgatcgcagcattgccctccagcctgggtgacagagcaagaccctgtgtcgaaaaagaaaaaaaaatatggagagatagaaaaatgaaaactcccatctaactgccaggccttcgcatgtgctttcccgctgcctggaacacaggcccccatgcctactctgagtctttctcatcctttccaattctccaggacacctgaccccctcctaagttgaggaggtgtctcctccagattcccacaaccccctgagcttcctccatcccagccccgaccactctgggctgtcactgcctggtgtcactgtcactgcctgtctcccacattggactggagccccataagggcaagtcctgattatctcatcatcccatgtacccagtaccatccaaacctgggccaggcacagggcgggcccttggtgaatggttttgaatgaatgaactcatgcattgcctgcccaggcacctcctgacctctctctgtcctgccctgcagtgccgagaatggggagaaggaagaagttcccgagcccacaccagagccccccaagaagcaagcacctccctcaccccctccaaagaaggaggaagctggaggcgaattctggggagaactggaggtgcagagggtgaagttcctggtaaggatccagccaggtcacctgaaccttcttctccccgggagccccacctctggtgcccacctctcctgctcaccttgttcttgagttcatctgttcaagctcgtctctaagaagaaccctagctggggaaagggcagaggtatccccagacctgcggacagggtagcattttcagatggccctcacttggttccttgtcccttccctgctcactatccttattccaacctccatacctctgttcatcggggccacccacccacacttccacctccatcctctgtccagagctacattcagtgaggccaccactctggccttcccaccgtggcctgttcttggctgtcagcccttacagtctcagtccctccaccactcccagtgctgctgtggaggtctgagctctcccaattcctggggaagcgttcatctcatccaggccaggaagaagggtgggtgttgggaggcaggtcccagggttccctccatcctgtctcccctccaggcctggcccgataggagggggtgagggaggctgggcacggtgggtcacacctgtaatcccagcaccttgggaggccgaggcaggcggatcgcctgaggtcaggagttcaagaccagactggccaacatggtgaaaccccatctctactaaaaatacaaaaaaaaaaaaaaaaaaaaattagccagccatagtggtgcatgcctgcaattccagctactcaggatgctgaggcatgagaatcgcttgaacccaagaggcagaagtttcagtgagccgagatcgtgccactgcactccagcctgggcgacagagtgagactctgcctcaaacaaagtggtggtggggggcgggggggcggtgagggaatcatgtggaacgaaggtggttccgtcagaatttgtgggaagaatgagggatggagggaaaggtggagagaaagagggagagatggaagatgttcctggccgtgcgagggggctcatgcctgtaagtccagtactttggaagtccaaggtaggaggatcactggagcccaggagtttggggcaagccagggcaacatagggagatccctgtctctacaaaagaattttttttttttttgagacggagtctcgctctgttgcccaggttggagtgcagtggcacaatctcggctcactgcaagctctgactcctgggttcacgccattctcctgcctcagcctcccgagtagctaggactacaggcgcccgccgccacgcctggctaattttttgtatttttagtagaaacggggtttcaccgtgttagccagaatggcctagatctgaccttgtgatccacccgccttggcctcccaaagtgctgggattacaggcgtgagccactgcacctggccgaatatttttaatctttttttttttttaattactgctccttgcagagcagggctaccctctaggcagtgcacccagagtagccaaaaatgtttttttaattagctgggtgaggtgacacatgcctgtggtcccagctgttcaggaggctgaggcgggaggatcacttaagcacaggaggttgaggcagcagtgagctatggttgtgtcacttcactccaacctgggtgagagtaagaccttgactcaaaaaaaaaaaaaattccctttcatcttctgtaaagcaggcagggcgacaggtggggtgacctcactcaggaagcagcatggccaagtggcttggagcttggactctggaggctgactgcccgggttcaaatcccatctctgccactcgttggttatgttaccttgagcaagacaccacttccctgagcctcagtttcctcatctgtaaagtgcgcataacagtagtgcccacttcacaggggtgtactgagaattaaacaagctcatgcaaataaagttcttagcccagatgttggtataagcaagcactcaacaaataggaggttgaggccagccgaggtggctcacacctataatcctagcactttgggaggctgaggtgggtggatcacctgaggtcaggagtttgagaccagcctgaccaacatggtgagaccccgtctctactgaaaatacaaaaactaactgagtgtggtggtgcatacctgtaatcccagctacttaggaggctgagtcatgagaatttgaacccggtaggcagaggttgcagtgagccgagatggcgccactgcattcgagcctgggtgacagagtgagaccttgtctcaaaaataaataaataggctggacgtggtggctcaagcctgtaatcccagcacttaggctgaggagggcggatcacgaggtcaggagtttgagatcagcctggccaatatggtgaaaccctgtctctactaaaaatacacaaattagctgggcgtggtggcacacgcctgtagtcccagctactcgggaggcggcagcagaggaattgcttgaacccgggcggcagaggttgcagtgagccaagatcgcaccactgcactccagcctggacgacagagcaagactctgtctcaaaaataataataataataattaataaataaataggaggttgtaggaaagatattgagagcccaggtactttgattgcaggtaaatgatgggatgaattctccagggaagaggctgatctgtgagcgctttctctctttttctcttctctctcagaactacctgtcccggaacttttacaccctgcggttccttgccctcttcttggcatttgccatcaacttcatcttgctgttttataaggtgctggtcctgaagggctgggagggtcaggcccttttccatgctgtgggatgggaggctcagcccctatcagaatttcagggttcctccactgaagggataaggtattgggctttgggtcgttaggagggttcaggctggacacctggatcctgggacccccctccatgggggtgagtaggggatatctggatccatctgggacagaagcctgagtgtctgtgggagttagagcaggagcaggagctgagttctctgctcagctcggccacatgccagtcctgtgcgcctgggtgcaggccctcagctcttggcaacacccactgattctgttaagcatctttggtttcacataagctaaacagaagtttgcagggaggaagaaatgggccactcacagaatggaaggaatgggttaagaaccaggcctcctgaaggacaaagggacccttggggtcttgccaggggtctagataacaggacagtaaggtagactagagagatcgaagcatggcttctgtgggacccagaagtcccacagtgggactgcccactggcgcatgacgataggcaaggtgcttaccatccctgtgcctcaactccctcatctgtaaaatggaatacctcttagagctgtggggattgaaagaggataaggcaccaggcacagtggctcacgcctgtaatcccagcactttgggaggccgaggtaggtggattacctgaagtccggaattcaagaccagcctggccacatggtgaaaccccgtctctactaaaaatacaaaaaaaaattagccaggcctggtggcgggcacctgtaatccaagctatgcaggaggctgaggcagtagaatcccttgaacccaggaggcaaaggttgcagtgagccgagattgcaccactacactccagcctaggtgacaagagtgaaactccgtccaccccaccaaaaaaaagaggatgagtgtgtgtaaggcagttagagcaacagtacctggcatataaaaagcactgtgtaaatgtttagctgctactaattttcatgttagtgttaatattagtgggcagtctctttagggctccactatcaagatgaaccaactctgtcttcagttctgtgccactcagttcaataggctaattcccaggtcagagtctgatttgctagctacagccctaggcccaacccttgatcttgattgacagccacaccaagactgtatctggtatggtcccagtccaatctcgggaatggaggctcaattttgtgagtgggctctgcatgtggcagacccacagatgaatctctgtccccatttcaggtctcagactctccaccaggggaggacgacatggaaggctcagctgctggggatgtgtcaggtgcaggctctggtggcagctctggctggggcttgggggccggagaggaggcagagggcgatgaggatgagaacatggtgtactacttcctggaggaaagcacaggctacatggaacccgccctgcggtgtctgagcctcctgcatacactggtggcctttctctgcatcattggctataattgtctcaaggtgggcccatggccatggttctggggcaagggcttattggctgggtgggggtgggggcagtgctggagcactggctggggctgggggccctcaaagtggttgggacagagggggcctagggttggggtgagggctggggaactgggtacaggattggggtctccagcaaggatgacaggggtctccagtaaggacgacattcagattgggaacggacacggcttatagctgaggaaccaggttctggaccactgtcttgatactttgctattgaactagagttctttgggcttaaaactttcatacatgctattccctctgcctgcaatactttgccctgcttccacctccttgcacctgcctgttttattcatccttcagttctgagttcagacctccctcccttgggaagccccaggtggcatcaggcaccactcctgggctcccacagctcccctgttctcacatcctggcccgatccctctgcctgtgccccacccccattccagccctgacccctatatgcccctacatcccagccctgacacccctgcctgtgcctctccactgccagccccgactgctctgcctgtgccccccaattccagccctgactcttctatctatgccccctatcccggccctgacccctctatctatgcaccacattccagccctgacccccctgcctgtgcctcccccatccctgccctgacccctctgcccatgttccccacatcccagccctaagccctctgcctgggcctcatttctacccttatcactgggaaagcacttctgatgtggggtcacacacagaccccagcaagatgtcatggcttctgctgagactatggtccagccaaggtgcctgacgcccacctttggcctcctcccactatccaggtgcccctggtaatctttaagcgggagaaggagctggcccggaagctggagtttgatggcctgtacatcacggagcagcctgaggacgatgacgtgaaggggcagtgggaccgactggtgctcaacacgccgtaaggacccagcccccacctcagggtggcagcaggaggggacctgggtttccacccagtccaggcctggaccccaaaaaactagggtttcggtccgggcacggtggctcacacctgtaatcccggcactttgggaggctaaggcgggcggatcacgaggtcaggagtttgagaccagcctggacaacatggtgaaatcccgtctctactaaaagtacaaaaattagctgggcgtggtggcgggcgcctgtaatcccagctactgggaaggctgaatcagaagaatcacttgaacctgggatgtggaggatgcagtgagccgagatcgcaccattacactccagcctgggcaacaagagtgaaattccacccccttccccccagacaaaaaaaaaaaaacctagggtttcagtccctgcaggccctgcctcattctccccaagtcttactctttctttccataaaagaggcacatttcccatgcattacagcatctgtgtgggtgaggttggcacacagagattcctagacttgaggcctggaggttcctgttcagtgactctggggtgtgagcccaggaacccgtgttttaaaccctgtctccaggtgtgattcttactcaggtgcaatgagtgcaaaataaaaaaacatggccaggcacgatggctcatgcctgtaatcccaacacttgggaggccaaggtggcagatcacttgaggtcaggagttcgagaccagcctagccaacatggtgaaaccccatctctactaaaaatacaaaaattagtctctactaaaaatacaaaaagtaggcatggtggtgggtgcctgtggtcctagctactccggaggctgaggcatgagaatcacttaaacctgcgaggtggaggttgcagtgagccgagattgtgcctctgcactccagcctgggcaacagagcgagactccatctgaaaaaaaaaaaaaaaaggaaaagaaaaagaaaggaaaaaaaaaaaagaaagaaaagaaatcattaggggccctaggggccgcactcagtggctcacgcctgtaatctcagcactttgggaggctgaggcaggaggatcccttgtgcccaggagttcaagaccagcctggacaacatagagagacctatatctttagaaaaaaaaaactaaaaagttagccagacatgctagcctggctagcgcatgcctgtagtcttagctgtttgggaggctgaggctggaggatggcgtgagcccaggagttctaggctgcagtgagctatgattatgccactgtccttcagcctgagtgacagagcaagaccctatgtctgggggccaaaaaaaaaacaagtaggaattggaagtgcaatgaatcaaagcacttcaaataattgcaaatccgtgaattcataatcaatcatcgctccaccctctcaaaaaacaaaactcgtggctgggcacagtggctcacatctgtaatcaatcctagcactttgggaggccgaggcaggcggatcacgaggtcaggagatccagaccatcctggctaacatggtgaaaccctgtctctactaaaaatacaaaaaaattagctgggcgtggcagtgggtgcctgtagtcacagctactcgggaggctgaggcagaagaatggcgtgaaccgaggaggcggagcttgcagtgagcccagatggcaccactgcactccagcctgggcgacagagcgagactccgtctcaaaaaaaaaaaaaaaaaactcgttggccatatttgaggatgttagggcatcaatttgtcacttggaaaactggtgaataaagggccagaatcatgaaattaaatgaaatcaaccagtatgaggaagcaggcagttgcactggagttggtgctgagttaggctgctgttttggactcctccccacccatcaccacgccagagcctctttatcagagtgccattctgaggtcttttttgcacatctggctctgaatgcaaattctctgcctcatttggggtctagcaaagatggcagtggggtccccactgttcaaggttcctacaagaaaagcagtggagccaggcgcaggtggctcacgcctgtaatcccagcactttgggaggccaaggcgggaggggggatcacctgaggtcagaagtttgagaccagcctggccaacatggcaaaaccctgtctctactaaaaatacaaaaattagccgggcgtggtggtgggcgcctgtaatcccagcactttgggaggccaaggcgggtgggggcatcacctgaggtcagaagttcaagaacagcctggccaacatggcaaaacctcgtctctactaaaaatacgaaaattagccgggcgtggtggtgggcgcctgtaatcccagctactcaggaggctgaggcaggagaatcgcttgaacctgggaggcaaagtttgcagtgagcagatatcacaccactgcactccagcctgggcaacagagtgagactccatctcaaaaaaaaaggaaaaagaaaaacagtggagtttcagccaaccctgtcgtggctgacagctctgatccctctggccctaacatcttatactcacgctttctctctctctctctgcaggtctttccctagcaactactgggacaagtttgtcaagcgcaaggtgagaggacatggatgccctgggtcctggattgggtccctgcctgccaccaggccatcacaggcctgccaagcacttgcttggtgtgtgaccttgggcaagaggtttttttgcctttctgagtagcacctcagtttccccatggggagatgggcatagtaagcttgcttccctttcttgaatgggcacatggaaagagcagagcatcaaggccaagcgtggtggctcacgcctgtaatcccagaactttgggaggctgagatggatgtaacacttgagctcaggaatttcacagcagcctgggcaacatggcaaaatgccgtctctaccaaaaatacaaaaaattagcacggtaccgcatgcctgtagtcccagctactcaggaggctgaggtgggaggatcgcttaacctgggaggcagaagttgcagtgagccaagattgcaccactgcactacagcctgggtgaaagagtgagacctcatctcaaaaaaaataataataacaaaaaataagaaagcatagcatagtgcctggcacagagtgaatactcaagaaatactggttgaggccaggagcagtggcacacgcctgtaatcccagcactttgggaggccgaggtgggcagatcacttgaggtcaggagtttgagaccagcctggacaacatggcaaaactgcatctctactaaaaacacaaaaattagctgggcacctgtaatcccagctacttgagagactgaggcaggagaatcacttgaacccgggcggcagaggctgcagtgagccgagatcgcgccattgcattccagcctgggtgacagagcgagactccgtctcaaaaaaagagagaaatactagttgaaagagaggaagttagcaatatgtcttaagcacacacactctggaaccagattgcctgcttttcttttgtttttttctttgagacggagtctcgctctgttacccagtctggagtgcagtggcacaatctcagctcactgcaacctccacctcccgggttcaagcgattctcctgcctcagcctcccgagtagctgggattacaggcacccaccaccacgtctggctaatttttgtatttttagtagagacggggtttcgccatgtgggccaggctgatctcgaactcctgacctcaggtgatccacccgcctcggcctcccaaagtgctgggattacaggcacgagccaccgcgcccagccgattgcctgcctttctatttctggcttattgacctttctgtacctcatactcaaagtggggtaataatacggccaaccctacagggttgttgtattatgtactacatgagcagtatctggcatataggagaacactagatatgttggctgttactataattcgttcactcatatttacggagcacctattatgtgccaggaacagttttagaaacctgggatcccgtgttaaacaaaacagtgattctgaccttcaagttggaaagatagatgatgaacccaagtacagtatgtcagtggtgataaatgctgtagaaaaaaacaaagtgggctgggcacggtggctcacgcctgtaatcccagcactttgggaggccaaggagggcagatcacttgaggttaggagttcaagaccagcctgaccaacacagagaaaccccgtccctactaaaaatacaaaattagccgggcatggtggtgcatgcctgtaatcccagctactcaggtggctgaggcaggagaatcgcttgaacccgggaggcacaggttgcagtgagcagagatggcgccactgccctccagcctgggtgacagagggagactgtctcaaaaaaaaaaatgcacctcccatttctcactcagagtttggagtgtccccagaacccccttgcaggccacgacacacacccacactccagctgtgtctacacagcctgatgctctcttgtgcaggtcctggacaaacatggggacatctacgggcgggagcggattgctgagctactgggcatggacctggccacactagagatcacagcccacaatgagcgcaagcccaacccgccgccagggctgctgacctggtgagcccaggacacccctgcacaggcctggggcatgcaggggaggtgactggagtctgacactcaagcatctctccccacccccgcccccacaggctcatgtccatcgatgtcaagtaccagatctggaagttcggggtcatcttcacagacaacgtgagcaggggcccacagactggggagggactctgcaggggtggggcgttaggagggttcccaacgtcgggtgttcctgaccaaagaatgactcctgggaccctgagtggctgtgaccctagggtatcttcttatccacacaaggctccttatccccctagacatcttattagtattattattactatttttttttaaatagctgggattgggtgtggtggctcacgcctgtactcccaacactttgagaagccaaggctggtggatcactggagcccagagtttgagaccagcctgggcaatatagtgagatcctctctctacagaaaatttaaaaattagctggggctgggcgtgctggcttacgcctgtagtcccagcactttgggaggccgaggcaggcagatcacttgaggtcaggagttcaagacaaacctggcactgggcatggcagcaggtgcctgtaatcccagctactcaggaggctgaggcaggagaatggcttgaatccaggaggtggaggctgcagtgagccaagatcgcaccactgcactccagcctgggcgacagaatgagaatccatctcaacaacaacaacaacaaaaacacaaaaaattagccaggcagacaggcacagtggctcaggcctataatcccagcactttgggaggcggaggcagaggtttgcttgagctcaaacgtttaagaccagcttgggcaacttttgtagagacggtgaaaccctgtctctacaaacaatacaaaaattagccaggcgtggtggtgcacacctgtagtcccagccactcaacaagctgcggtgggaggatggcttgagcccaggaggcagaggtttcagtgagctgcatgtgcaccactgcactccagcgtggataacagagcgagaccctgtctctaacaaaaaacagagagtggccaggtgcggtggctcaggcctgtaatcccagcactttgggttgggaggccgaggtgggtggatcacttgaggccaggagttagagaccagcctggccatcatggtgaaacccatctctactaaaaatacaaaaattagctgggtgtggtgacccacgcctgtggtcccagctactttggaggctaaggcaggagaatcgcttgaacccgggaggcggaggttgcagtgagctgagattgcaacactgcactccagcctgggcaacagactaagactccatctcaaaaaaaaaaaaaaaaaaattagctgggtgtggttacccacacctgtggtctcagctacttggcaggcttagcctccttcacttgaacctgagaggcggaggttgcagtgagctgagattgcgccatagcattccagcctgggtgacaagtgtgaaactccatctcaaaaaaaaaaaaaaaaaaagacagaggaagagatgatggagtctcgctatgttgcccagactggtcttcaactcctgacctcaagtgatgctcctgcctcagccccccaaagcactggggatacaggcatgagccaccacacccggcccagaacatcctttggctccctcagtgtgcccttagattgccagattatttccttctggagggggctctcatctccccgcaggatgccttctcacccggaatgccctgatcctccatgtactccccaaacagagctggcacccgacccccagggcacagctgactctcgagtggcccctaccctccagagtgctcctcgtgtgtccctgccttccccctgacccctggccctgtgtgcccacagtccttcctgtacctgggctggtatatggtgatgtccctcttgggacactacaacaacttcttctttgctgcccatctcctggacatcgccatgggggtcaagacgctgcgcaccatcctgtcctctgtcacccacaatgggaaacaggtgtggggaggacctggctgtggggcgtgggccagcagggaccagcgtggcagtgggtggtgaagggataagggccgggcagctgggctgaggaggggcaaggccaggtgcgctgagccgggggtgtgtggggcagcaaggtagagccacagggactgaaccggggccaggacccagcatgggcagggtggggggagggcaagcccagggcggagctgacctggccccatcctgcccccagctggtgatgaccgtgggccttctggcggtggtcgtctacctgtacaccgtggtggccttcaacttcttccgcaagttctacaacaagagcgaggatgaggatgaacctgacatgaagtgtgatgacatgatgacggtgagcccctcccctagcactctgggacccttccttctcgcatctgttgaaggagttaataatggtacctccaggccgggcgtggtgcctccagcctgcaatcccagtgcgtcgggaggccgaggcgggacgattacttgagtccaggagttggaaaccagcctgggcaacaaagcaaaaatcctgtctctataaaaaaaaatttaaacgttagctgggtgttgtgttgtgtgcctggaggctaaggcaagaggatcacttggtcccagcagtttgaggctttagtgagctacgaatgggccactacactccatcctggcagacagacagagaccctatctctaaaaaatgaaaatagtacctacagtttggcaagctgatgcatgccaggcacattttttttttttttttttgagatggagtctcactgtgttgccaggctagagtgcagtggcgcaatctcagctcactgcaacctccgcttcctgggttcaagtgattctcctgcctcagcctcccaagtagctgggactacaggcgcatgccaccacacccagatactttttgtattcttaattttctttctttcttttttttttgagacagagtctggcccaggctggagtgcagtggcgtgatctcagctcactgcaagctccgcctcccgggttcatgccattctcctgcctctgcctcccgagtagctgggacaacaggcgcccgccaccacgcctggcaaattttttgtatttttagtagagccggggtttcaccatgttagccaggatggtctcgatctcctgacctggtgatccgcccgcctgggcctcccaaagtgctgggattacaggcatgagccactgcgcccggccaatttttgtattcttagtagagacggagtttcaccatgttggccaggatggtctccatctctgcctgtgccgtcgtgatctgcccacctcggcctcccaaagtgctgggattacaggtgtgagccgccgcacctggccatgtcagatactttgaacagtgccaggcatatgagtgctccacacctcttcgccattgtttcaatattatttgagctgaggttttttgttgttgttgttcctgagacagagtctcgttctgtcacccaggctggagtgcagtgacatgacctcagcttactgcaacctctgtctctcaggttcaagtgattctcctgcgttagcctcctgagtagctgggattacaggcgcacactaccacacccagctgatttttgtatttttagtagagatggaggtgggggggtctcacaatgttggccaggcttgtctcgaactcctgacctcaaatgatccacccacctcggcctcccaaagtgctgggattacagatgtgagcaactgcacccggccttatttgagcttttcaaactattattattggaaaggtactcagggagcgtgcccctgccacttatgagccgtgtgattttggggcaggctactcaacctcctccctatgccctgggggcctcacctgtaaaatgagtgtgtaatagtagttgcttttaggactaataggtgctccctggctatcgaagacttaaaagacttagaccattgccttgcacggtggctcatgcctgtaatcccagcactttggggggctgaggggggcagattacctgaggttgggagtttgagaccggcctgaccaacatggagaaaccccatatctactaaaaatacaaaattagctgggcatggtggcgcatgcctgtaatcccagctactcgggaggctgagacaggagaatcacttgaacccgggaggtggaggttgccatgagccgagattgcgccactgcactccagcctaggcaacgagagtgaaactccgtctcaaaaaaaaggaaaaaaaaaaagacttagactagtgcctggcacatcctcaggattatatagatgttagcttctatcatcattatccacaattaaaagtttcacccaggccgggcgcagtgactcacgcctgtaatcccaacactgtgggaggctgaggcaagaggattgcttgagcttaggagtttgaggttgcagtgtgctatgactgcgccactgcactccagcctgggtaacacattgagactctgtgtcaagtttaaaaaaaagtttcacccaaggtatacccagcgttcaatgcacatttatattttctcttctattctaataatggtgatcataacccaaattgatgcgaacttactagagacacaggccacaatccacaattaaaagaatcatttctggggtttatctccaaagatgtcctgcagtctggctccgtgggttcctccctgctctcaggacaaagtccagctcctcaacctgacatctgaggctcttccagacacggcctcgctgcccacagcctcgttctcattatagtcacttatcttagtttttactctaggatgactgtgttctctcacatcctggggacacggaaagaacaagtgtatgccgggcgctgtggctcacgcttttaatcccagcattttgggaggccaaggcaggtggatcatctgaggtcaagagtttgagaccagtctggccaacgtggtgaaaccctgtctccactaaaaatacaaaaattagtgggatgtggtggtgggcgcctataatcccagctacctgggaggctgaggcaggagaatctcttgaaccccggaggcggaggttgcagtgagccgagatcacgccattgcactccagcctgggcaacaagagcaaaactccatctcaaaaaaaaaaaaaaaagaaaaaagtacaaaaattagctgggtggggtgacacgcacctgtattcccgactactcaggaggctgaggcaggagaatctcttgaactcggtggtggaggtcgcagtgagccaatattgcaccacagcactccagcctgggcaacagagcaagactctgtctcaaaaaaaaaaaaaaacatatgtaaagttgttcccaaatgccaggtagaccatgctccctccccacccccactcagacccttcttgtggctccccagcccactgtagataaagtcgaatcaccctgccgtggcttacaaagcctgggaagggctggccctgcctgggtctaaccgcaaaccctcttgctttttgctttctagccgcctggtcctctttcagttcccctaggactgtgtgttttctcccaattcaagccctttgcacctgatgttctctctgtcccctaccccaggcctgacatacacacacaccccattcacttgatacctcacctttccacttaaatgccacatcctacaggaagccccttgaccgcgggctgggccagggcccacagagccacatgcccaggccctgcctcatctctccctgctctcctgcacaggagctctattttccagcctcacccaaccattttcagttcctcacagcagcaggatgtactctttcctcactgatggcgaggcagcatgtggccttctctgctgggaacactctcccaccacccctccacctaaggcctcctttaggtttcagctcacacctgcctcctcttccaggaagcctcacctgatcacctaggctggatcagatgcctccagcgggctgttaaagcttccagtgcttcccctagctcatccctggtcacactgtgcctccccaccccagcctcgaccctctgcctgtgcccctcccatcctcgccctcacccttctgcctgtgcccccctatcctggccctgatccctacacctgtgcccccccccacccatcccggccctcatccctccgtctgtgccccccatccatcccggccctgacccctctgcctgtgccccactatcctggccctaacctctcagcctgtaccctccatcctggccctgacccctctgcctgtgccccccacccaacctggccctgacccttctgcctgtaccccccattccagccctgacccctctgcctgtgcccccccatgctagccctgacccctctccctgtgcccccctatcctggccctgacccctctgcctgtgccccccttatcctggccctgattcccctgccagtgccccccatcccagccctgacccctctgcctgtgccccccttatcctggccctgacccctctgcctgtgccccccatcctggccctgacccctctgcctgcgccccacacccaacctggccctcacccccctgcccgtgctgttcctgtcacagccctgaccatttctggctgttggtccctgtctgatgccgtatctgtgagccctttgagggcagggcccagggctgtctcagtcgttaccatgtcttcagccctgcctatcccggggccttggctggtactcagtgaatgtcgaatgaatgagtgaccagtgtgctcccctccctcagtgttacctgtttcacatgtacgtgggtgtccgggctggcggaggcattggggacgagatcgaggaccccgcgggtgacgaatacgagctctacagggtggtcttcgacatcaccttcttcttcttcgtcatcgtcatcctgttggccatcatccagggtcagtgctgggagtgggcgctcagggcccggaggcaggctagctccatggctaagaatgcaggcccaggatccagtcggcctgcattcataccccatctctacctctcgctactgtgagaccttgggcaagtcacctctcggggcctccgtttctccatctgcaaaacgagggtgtcaatggtactaacctcataggttgtgatcaggattaagtcagttcataggcgctcggtgtctggctcatatgagtgctcaataaaggcctgagatatatatatatatatatgtttatttatatatatatgtgtttatatatatttatatatgtgtttatatatatttatatatatgtgtgtgtgtctatatatatatatgtataattttttttttgagagggagtctcgctctgttgcccgggccagagttcagtggtgcaatcttggctcactgcaacctctacctcccaggttcaagcgattcttctgcctcagcctcctgattagctgggactacaggcacatgctaccacacccagctaattttttttatttttttattgttagtagtgagggggtttcaccatgttggccaggctgctcttgaactcctcacctcagatgatccgcccacctcagcctcccaaagtactgggattacaggcgtgagccaccgcacccggccaataaaggcctaatactatcttcttaggaagcgagattaggggtgagattagggaaatgggggatggagggcaagccctggaggtaggtagctggagaggggggagtctgaaccaggtcagaggtcgggcactgacttgtgtcctgccaccccaggtctgatcatcgacgcttttggtgagctccgagaccaacaagagcaagtgaaggaggatatggaggtaggtcatgtctgggggtgacccagagggattacgggattcagggggtcaagtgggcctccactctgatgtctcttgccactcacagaccaagtgcttcatctgtggaatcggcagtgactactttgatacgacaccgcatggcttcgagactcacacgctggaggagcacaacctggccaattacatgtgagcagacacactggccagtcaggagggtggggggcatggctgccaatagccagcagtggggtacttagctttggccagttaggaaagggggtgtagtgtccatgtgggcagattccctgccagccaatcagaaggtaagggtggggccccgcaagatggttcacacctgtaagcccagcactttgggaggccaagtggggaggattacttgaggccaggagttcgagaccagcttgggcaacatagcaagacttcctctctactataaatgaaaaataaaataaggtaagggtggttctgacttgtctcctgtggtcctctcaccctcaggtttttcctgatgtatttgataaacaaggatgagacagaacacacgggtcaggtaagggggtgttaatgggaggacagtgggcaggacgtggagccctttaacataaggccagtcagtaggtggcagtaaaaagctcctatcaatatcaagggttagggctgggggctgggcacggcggctcacgcctgtaatcccaacactttgggaggccaaggcgggtggattacttgaggtcaggagttcaagaccagcctggccagcatggtgaaattcagtctctactaaaaatgcaaagattagcagggcgtggttgtgcatgcctgtaatcccagctacttggaaagctgaggtgggagaatcgcttgaacccaggaggcagaagttgcagtgagccaagatcatgccactgtactccagcctaggtgacagagcgatactccatctcaaaaaaaatgggtttgggctgggcgtcctggctcacgcctgcaatcctagcacttcgggaggccacagcgggagaattgcttgagaccagaagttcaagacagcctaggaacacagcgagaccctttctctattaaaaaattagccaggggtggtggtgtgcacctgtagtcccagctactctggagactgaggtggagaatcgcttgagccaggaggctgtagtgagctgtgattgtcgccactgcactccagcctgggcaacagagcaacaccctgtctaaaaatatatatatatatatgtctcaagggtttgaagatgtgaccaatgaactctttctatccccaatcctaggagtcttatgtctggaagatgtaccaagagagatgttgggatttcttcccagctggtgattgtttccgtaagcagtatgaggaccagcttagctgacacacccccagctggccctccacccccacctcaagtgccttattctcacagcaagccccttagtccccaagcccctccccctaaggcagctgggggagaggtgacctagtactggaaaataaatctgtgctacgccccccagcatcactgtgttggcctgctgaaattttggaggagtggacatccaggaattgtttcccccaagaaaaacaagatgacagcagaggctaaagtcatgtttattgggagatgaggacatgccatgaccactagtgtgtctatgggggagggggtgcaaggactagttcctgacacccccctagggactcattcctggatgtagaggttgctgggagcagtaggatcatccactgggcgtgtctccaccactacaggcctgtggaaggaagagataagtcagttcatttattcattcatatgttcattgattcattaattcacaaagtagttaatagagactgtgccagccccatgctgaactatagcagtgaatgggcagacacggtccctgcccttaggaagcttgcattctagagaaggagatcaacatgaatcagtgaattacatgagtgcaaaaaagcatggcatgtctggcagggaaacctaacccaggaggtcagcccagactccccagagaatggatggtgcagcctgaaggggggttaggagggaacttggtgaaagggcaaggaagagtgttctggctggggagaacagcctgtgcaaaggatttgaggtgggagaaaggctgggacttggctggagatgtcatggccttgtgggctgtggccaggattgagtctttatcttgaggccatgggaggattttaagcagggagacagtgacacgatcagatttggatttaaagtgacccttctggcatgtcaaaaggacacaggggctacttaaagtggttcccactggctaaatttaagaccatttgtgcctcaaaataaataatgacaaggccgggcatggtggctcatgcttgtaatcccagcactttgggaggccaaggggggcagatcacttgaggtcaggagttcaagaccagcctggccaatatggtgaatcccatctctactaaaactacaaaaattatccaggtccatcctggctaacacggtgaaaccccatctctactaaaaatacaaaaaaaaattagccaggtgtggtggcaggcactatagtcccagctactcgggaggctgaggcaggagaatggcgtgaacctgggagccagagcttgcagtgagccgagatagcgccagtgcactccagcctgggcgacagagcgagcctctgtctcaaaaaaaaaaaaaaaaatttatccaggcatggtggtgcacgcctgtaatcccagctattcgggaggctgaggcaggaggatcgattgaacctgggaggcagaggttgcagtgagctgagatcacaccactgcactccagcctgggtgacagagcgagactccatctcataaataaataaataaataatgacagtaatagactataacccacagaataaaaatccatgagaccatgctggtataaagaaagaagaatggagaagacacagctcttctttagagtagaatgccaactaacacacgcagaaggaaacatagaatcagaaaatcaccatttattgttagtagccacctaacaataatagattcagggaaaaatcaattgattctaaaactagtgggcaggccaggtgcgttggctcaaacctgtaatcccagctactcgggaggctgaggcaggagaattgcttgaacctgggaggaggaggttgcagtgaggcgagatcgtgccactgcactccagcctgggggacagagtgagactctgactcaaaacaacaacaaaagacaaacaaaaaacaataaaactagtgggtgaaaatctgatgagaaacaacgtatttacagactatttacctcgtctcagtgaatctccccaaaagatacttctttttttttttttgagacagagttcactcttgttgcccaggctggagtgcaatggcgcgatctcggctcactgcaacctccgcctcccgggttcaagcgcttctcctgcctcagcctcccgagtagctgggattacaggcatgcaacaccatgcccggctaattttgtatttttagtagagacagggtttctccacattggtcaggctggtctcaaactcccgacctcaggtgatccacctgcctcggcctcccaaagtgctgggattacaggcgtgagccaccgcgcccgaccggtgggatacttcttattacaaagaaaaacagaggctgggtgcggtgacccctgcctataagcccagcactttgggaagcctacacaggtgaatctcttgagtccaggagttccagaccaggctaagtaacatggcgaaaccctgtctgtacaaaaaatacgaaaataagccaggtgtagtggtacgcgcctgtcatcccagctacccgggaggttgaggtgggaggactgattgaacccaggaggtcgaggctgcagtgagccatgatcgcgtcactgcactccagccagggtgacagagagagaatctatctttaaaaaaaaagaaaaagggagaaaaaagcaacttcacagtggagagaactggctgattctaccttaaccaaatgaccgaagttaatatcaccagtaatgggacaaactagcattgtgtacttcctgaaatgatgcactgagaaagacatctttctgcagtattcctgcccaaaattcagaacgtggaaacctcaaacacagttaagggacattttagaaaacaaatttcctttaatttttaaaaaggtcaaagctcctttaagacaaaagaagttttaattattttttccggcttaattataaagaaacatggctcctaagtgccacctatgatcttggaccagaaaaaaaaaaaaaaaaaaaaaatatatatatatatatatatatatatatatatatatatatataatcacgggcgtcactaggacaacgggtgaaattttttgttgttgttgttgttgttttctgagacagagtctcgctctgtcacccaggctggagtgcagtggcgtaatctcggctcactgcaacctccacctctccgattcaagtgattctcctgcctcagcctcccagctgggattacaggcacgtgccaccacacccagctaatttttgtatttttactagaggtggggtttctccatgttggccaggcccatctccaactcctgacctcaggtaatctgcccacttcagcctcccaaagtgctgggatgacaggcgtgagccaccacacctggccaactggtgaaattgagtaggggtatgaattagaaggttgtgatgtttcagtgttgttttcttgattttgacagctgtgctgtggtttgtaacattatgtccttgctttgattcaggaaacatacactgaagtattttaggggtaaatgggcatcacgtctgcaattcattcccaaatattcattaaaaaatcacacacacacacacacacacacacacacacacacatatacttgtatgtgtggtgtgtgcgcataagaaagagaagaggccgggcatggtggcacatgcctgtaatcccagctactcgggaggctgaggcaggaggagtgcttgaacccaggagtgggaggttgtggtgagctgagattatgccattgcactccagcctgggcaacaagagcgaaactctgtctcaagaaaagaaaaaaaaaagaataataaggcaaatgcggttaaaaagattaacatctggccaggtacagtggctcacgcctgtaatcccagcactttgggaggcagaggtgggtggatcacctgaggtcaagagttcgagaccagcctaaccaccatgatgaaagcccacatctactaaaaaaacaaaaaaattagctgggcgtggtggtgtgcaactgtagtcccagctactcaggaggttgagacaggagacttgcctgaacccgggaggcagaggttgcagtgagtggagatccactgcactccagcctgggccacacagcaagactccatctcaaaaaaaaaaaaaaaaaaagatctggttaatctggataaaagggatttttgcaacttctctgggagtgtgagttttaaattatgtcaaaatagttaaaatagttatttttaatagttaaaaatttttaataagataaaaatctaaaataaaaatgcagccagggctgggcacggtggctcatgcctgtagtcccagcactttgggaggccgaggcgggcagatcacctgagatcaggggttcaagagcagcctggacaacatggcgaaagcctgtctctactaaaaatacaaaaattagccgggcacagtggcacatgcctgtaatcccagttactcgggaggctgaggcaggagaatcgcgtgaacccagtgggtggaggttgtggtgagctgaaatcacgccaccgcattccaggctgggcaacagagcaagaatccgtctcaaaaaaaaaaaaaaaatgcagccaggtgtggtggctcatgccagtaatcctaacattttgggaggccaaggtaggaagattgcttgaggccagcagttcaaggacagccagggcaacatggcaagaccccgtctctacaaaaaaattttaaaaattagccagttgtggtggtgtatgcctgtggacctagctacttgggaggctgaggtgggaggatcagttgagctcagaaggtcaagactgcagtgagctgtgtgtgtaacactgcacttcagcctgcgcaacagaatgagaccttgtctcaaaaatgaaataaaattaaggccaggtgcagtggctcactcctgtaatcccagaactttgggaggccaaggcagctggatcacctgaggtcagtagtttgagaccagcctggctaacaaggcgaaaccccgtctctactaaaaatacaaaaaatagccaaatgtggtggtacacacctgtaaacccagctacttgggaggctgaagcatgagaatcacttgaacctgggaggcagaggttgcagtgagctgagattgtgccactgcactccagcctgggcaacacagcgagactctgtgtcaaaaataaattttaaaaaaattttataaataaaagaattaaaattaaaaaataaaaggattggccaggtgcagtggctcatgcctataatcccagcactttgggaggccgaggcaggtggatcaccgaggtcaggagttcgagaccagcctggccaacatggtgaaatgccatctctactaaaaaatatagtattagccgggtgtggtggcacatgcctgtaatcccagctacttgggaggctgaggcaagagaatcgcttgaacctgggaggcagaggttgcagtgaaccaagatcacaccattgcactccagcctgggcaacaaaagcaaaactccatctcaataaataaataaataaataaataaataaaagaattgctgggcatggtggcacatgccggtagttccagatactcaggaagctgaggtgggtggatcacttgagcctgggaggtcaaggctgcagtgagccgtggtcgtgccattgcactccagcctttgagtacagtgagaaacaaaacaaaaagagagaacgcccccgtggctgcagtgcagagaacagactctagggagcagggatggaagcagggtgaccaggtgagacactgtccaggctagagataccttgctggggacacctcagaatgctctcttcacatcagaagccccctcccaggtccttctgcaccccaccccacaacatacctgggggagccaagcagacggaaagtgagggtagggtctctcagctcctgtagcagctagggaaaaaaagtgtgtgtctcagtgcctggaagatacctccactgtcactacgaacatggctcccttaaagacagcaaggagctgggcacggtggctcacgcctgtaatcccagcactttgggaggccgaagtgggtggatcacctgaggtcaggagttcgagaccagcctggccaacatggcaaaacctcgtctctactaaaaatacaaaaattagctaggcatggtggtgcgcgcctatagtcccagctactcaggatctgaggcagaagaatcacttgaacccgggaggcagaaattgcattgagctgagattgcgccactgggcgtgccactggagccgagatctccagctgagataatttttgtatttctactgaaaatacaaaaattagccagctgtggtggcgcatgcctgtagtcccagctacttgtgagggtgaggcacgagaatcgcttgaacctgggtggcagaggttgcaatgagccaagattgtgccactaacactccagtctggggaacagagcgagactccatttcaaaaagagggaaggaactgagtgagcaaaaataaataaataaaaatactaaagtgtaagggcaaagtctgacacagtattctgtgagataaacaccattttccaaatgaggacagtgaggcacaggaaggttaagtcatttgcccaaggccactcagctgaattccaacccagacagtcttgtcttaactatccatatatctctatagtggtccccattttacagttggggaacagaagcttaaagagaagcaacgttgccagcccaaggtcacagtagtggcccaggatgagattgggactcaagaaatccaagagcagccaggtgcagtggctcacacctgtaatccaagccacttgagaggctgaggagggaggattgcttgagcccagaaagtcaaggctacagctagctatggttgcaccactgcacttcagcctggacaagagagagagaccctatctccaaaacaaacaggccgggtgaagtagctcacgcctgtactcccagcactttcggaggctgaggcgggcagatcacttgaggtcaggagttcgagaccagtctggccaacatgacaaaaccccgtctctactaaaaatacaaaaattacctgggcatgatggagtgtacctgtaatcccagctactcgggaggctgaggcaggagaatcacttggacccaggaggcagaggttgcagtgagctcggatcatgccactgcactctgccctgggtgacagagcgagactctgtctcaaaaaatatataaaaatggccaggagtggtggctcacacctgtaatcctagcactttgtgaggccaaggaaggcagattggctgagctcaggagtttgagactagcctgggcaacatggtgaaaccctgtctctactaaaaatacaaaaaaattagctaagcatggcggcatgcacctgtagtctcagctactcaggaggctgaggcaggagaattctttgaacctgggaggcagaggctgcagtgagccgagatcgcgccactacactccagcctgggtgacagagcaagaatccatctccaaaaataaataaattttatctatctatctatctatctatctatctatctatctataaaataggccgggtgtggtggctgacagctgtaatcccagcactttgggaggccaaggcgggtgaatcaccccaggtcaagagttcaagaccatccagcctgatgaacatggtgaaaccccgtctctactgaaaatacaaaaattagccagctgtggtggcgcatgcctgtaatcccagctacttgggaggccgaggcaggagaatcgcgtgaacccgggaggtggaggttgcagtgagccgggatcgcaccactgcactccagcctgggcaacaagagtgaaactccgtcttaaataaataaataaataaaaataaaataaaaaataaatcctggggcaaagaaggggatctatctgaactgaaatttggaagatgtttcccctccaggacttcacactctgactcaggagttctcggagcccatctgatgaatgtcatgatggaggctggggggcagtgatgtggagtttggatggaggggcttacctgatccgagcctagagcccacacctgcactccatgcttccagaaggcctgaagctgacctccaaccatagctggggagaaagcaatgcccgttacccttggggatcacttgagtttccacccctgatcctgggctctcccgtccctgcacagacccacggcctccaccgcttcggtcatggggatctcaggtgtgcgaagtccccggactggggacccctccggggtcaccagcttcacagagcctggaaggagatagacggttttaagaactgtgagcaaggcttagagggttactaagggaccaatccataaattcagtgtgaaagctatgtaggacaggggcaaggcccagaggggctcagggggttctgagaagcacaagttcggaggcagagatctagggactgcagctggaggggtggggaggaaggggaggaaggagggttctcaccatccatcaacaccatcaccatatcttcctctacctgggtcacctgcacgggtcccctgtgctctgtttggggggagtgggttaaggattgaccccaccccattcccctttccccacaccacccccagaaggccagtacctgtgctttagccaccgcctcagttcacaagcaagtgggctaaaccccgcccaccatcccggtcccaccccatcatcaatctccccagttaactaaaacctgccattctcccttctccgcccttccagccctttctcagtcccgtagtgcctcaggctaagcgaagccccgcctccagctccgcccctccggatctgataagccccgccctcagcaagactccgccccactcaccggtgctcatctcgcccagccagcaagagagcgcgccaaagcgcaccgtgtggaagagcaccgacttccccggccgcccggggctcacgccgatgcacacagcgggcagctcagagcctggcccggtcagcagcgcgaacacggacagaggcgtcggcagtgggaacagcacctgctgcgggccgcacagggaggggcgggctagggggtggttcaggacggggcctcagggggcgtggcttgtagctggcctgggacttccgaaccagggccctaagtcttgggggatgccgtctagaaatgtcaggggataaggcctggtgcctccgcgggaacgggggtcgtgacctccgagtgggtgtggcttccatgtgggggcatgccaccttggcggcagacgggcagggccccaaagatagcaaaacctgcttagacactcaaagagacaggctctaaatgggctctactaggacacccagggagtggcagcattgagcctgaggaataattaggcccaggtgtgaggggcggcgcttaaggatcaggatggcttcagaaggacgaggctccaagcgcagaccgcaggtgggcggggcctcgggagattggggcggggcctcgacggaggtggggcttcatggagctcttgatagaagcgcaaagggtgcaaggccttagccacccactcctcagagttcccagcaccctcccaagccccttacccggacaagcaggaatttgttcatgggctggtaccactgaagcaggacaacggacgtctccaatgcaccgcacaggaacgggcccccagagctcgcaccctccgctgtggcatgggcaaggatgagtcaagatcaatgccctctatcctcctcgccacccacactaccacccatcttctgggttctggacacattgccttaactctgtaaccttctcaggtggatgcagttcaagcccctcctctggcctggccccgcccactctctgcacacccgtgaagctctctctcacccacacagcacgcccggcagcctttggtgtcctggatcttggtggaaaccatgttcttcctggagaataggtaggtgtgaaggggggtaggacagcaggaggcagaggggcatgggaggaattataaggctgtgtggtgccattcattgggagctggtaccttgccagtaggcggtgggggctaatgtgagcgatggggtttcctgctctggtctctttccgttccagcaggccaaggatgctatgagaatacaggtggggggtctttcctgcagggtgtgtgtatgtagggggaagcaggaagttataggatcccatataccacttcctttcctccatcccttccctcagccccatccctttgtctgaaactcccaagcctgcaagtctcaagtacttgtcattcattcattcatttctcactccacatagattgaacgtccattgtaggccaggcctgctgtgcttggctctggtgaacagtgatgagcataaaaaatatgttccctaccctcgtggtatttgtagccgtatcagaaactctggacacataaccagtcagatgaagttacacatcttacaaagttttagaagaaacacatctagaaaatcttctagtttgtcatcacagatgtggctttcactaactcatgaatcccatttggcttggtgtttcccccaaaactagaaattatttcatttatttattattattattattattttagacagtctcgctctgtcacccaggctggagtgcagtggtataatcttggctcactgcagcctctgcctcccaggttcaagcaattctcatgcctcagcctcccaagtagctgggagtagaggtatgcgccaccatgcctggataatttttgtatttttagtagagacggggttttaccatgttggccagtctggtctcgaactactgacctcaggtgatctacccgcctcggcctcccaaagtgttgggattacaggtgtgaaccaccgcacccggcctatttattgttatatatagacagggtctcattctgtcttccaggctggagtgcagtggtgtgatcatgactcactgcagcctctaacttctgggctcaagtgatcctcccacctcagcctcccgagtagctggaaccataggtgtgtgccaccacacccagctaatttttttttaatttttagtagagacgaggtctcactatgttgcccaggctgatctagaactcctgggctcaagcagtactactgccttggcctctcaaagtgctgggatcacaggcatgagccactgcaccccgtccagattttgaaatctataacttgctcactctatcttagtaaagtatggaataagttctgattgtcatctgaacatgaaagctatttaaagactaacttagggctgggcacggtggcttacacctgtaatcccagcactttggggggctgagacgagtggatcaccaggtcaggagttcgagaccagcctggccaacatggcgaaaccccgtctctactaaaaacacaaaaaattagccgcgtgtggtggcaggtgcctgtaatcccagctacttgggagggtgaggcaggagaatcgcttgaacctgggaaacggaggttgcagtgagccgagactgcgccactgcactccagtctgggcaacagagtgagagtctatctcaaaaaaaaaaaaaaaaaaaaaaaggactaatttaggccaggtgcggtggcccacacctgtaatcccagcactttgggaggccaaggcgggtggatcacctgaggtcaggagtttgcgaccagcctggccaacatggtaaaaccccatctctactaaaaataaaaaataaaaaaagtaaaaaaaaaaaaagccagtcatgatggctcacatctgtaataccagctactcgggaggctgaggcacgagaattgcttgaacccaggaagtagaggttgcagttagccaagatcacgcccctgcactccagcctgggcaactgagtgagactcggtctcaaaaaaaaaaaaaaaaaaaaaggctaatctaaggccaggtgtggtggctcatgcctgtaatcccagcattttgggaggccaaggcagttggatcacctgaggtcaggagtttgagaccagcctggccaacagggtaaaactctgtctctactaaaaatacaaaatttagccaggtgtggtggtgcacacctgtaattccagctactcaggaggctgaggcatgagaatcacttgaacctgggaggcagaggttgccgtgagctgagattgtaccactgcgctccagcctgagtgacagagggagactctgtctcaaaaaaagaaaaaaaaagactaatttattgtagaaactacctcaaaattgacttgagaggtgaggactattgtgaaccccattttacaaatggagaaattgaggcttggggagcacagtcaaaaagtgtctgggatttgaacctaggactttgtgaccaagcagtctaagttttttttcagctgtgcccgtctacttcccagcccccgaacccttggaccccttaacttccgaccccatcccacctgctacccacagccagacctgagagagacatgagaacgttgttgatggagtacacccacgtagtccggctaggaaagagctgcagggaatgggagagatggctctggtgacaccccagcaacccccgactccggcccttgcccttgccctggcccggtatggttcctcaccatttccagcgtggcctcctggtcattccggttcaggatgaagatgccttcctctgcccccaggagcaggtgctggtctggaggcacagacaaggacgctgggaccgacttcatcctcagggacctcccagatccccacctgtctgacctcaaacactgacactctgtccccagctctgaccctctattctttctccaaaccaatactcccagcctctgtttccccaaacaaagccagagcggacggtcccgcaagccagtctcactctccctccttttgactacccatattctggtggttctttcttctctgcccaactgtcttctgaaccaaactgaccccaaccttagacctgtcccccaaaatagtcctctgatttcctcccctctttctccccagttctgataccctaatgccaatcctaacattgaccttcaaactcagacacccccaaacaggactttttctgtccagtgtgacctgttcctttaacactgaccttgtcttcatctctttgatctctagattctgtccctttctggctgcatcctaatctctaaaattcctcaccccaaaatgctgctcccagtctccctatcattaacctccagctgtccatctttctcgtgctccaaactctaacctttttgttatattctgacactcctggcccctgaattccaatattcctactttcactctccaactcatccctctacccattttttttttttttttttttttttgagactgagtcttgctctgttgcccaggctggagtgcagtggcatgatctcagctcactgcaacttccgccccctggattcaagcaattatcctgcctcagcctcctgagtagctgggattataggcacgtgctaccacgcctggctaatttttgtgtttttagtagagacgaggttttaccacgttggccaggctggtctcaaactcctgacctcaaatgatccgcccgcctccgcctcccaaagtgctgggattacaggcgtgagccaccatgcccggcctacctagcttcttttgtatttttagtagagacggggtttcaccatgttggccaggctggtcttgaactcctgacctcaaatgattcacccgcctcagcctcccaaagtgctgggattacaggtgtgagccaccacacctggctgccctctatgcatctttgatcaccaaatcctgagtgtaaggacaagctccgcccctgtttcagcctggccacaccccaactccattaagctcctccccgtccctgcctttgtgccttccttaggcttctccccacccctacttttgctctcccattccctacaggatctccttgaccctccagaatgcccacccttggtggagggatgtgtccaggcggccgtgctgtggatccggagggggcagccattgaacaactttacgagaagggcacatccctgggcaggtcgccgcggggccaggcagcagatccggcaaagagagcagggaacaggaaggggcagtggttacgactttggagcgagagtgccaaggttcaaatcctgcctcttaccttggtgcaatttcccataatctatccctgtaatacactttttcatacattgagttttcttttcagtttgtttttgtttttttttgttgttgttatatatttctttttttagtttttcctccactatcctaaatcatcagcatttgttttttttaagacagagtctcactcggttgcccaggctggaatgcaatgacatgatctcagctcactacaacctctgcttcccaagttcaactgattctcatgcctaagccttctgagtagctgggaccaaaggcgtgtgccaccacacccagctaatttttgtatttttagtagagatggagttttgccatgttgcccaggctggtcttgaactcttggcctcatgtgattcacctgcctcagcctcccaaagtgctgagattacaggcgtgaggcaccactcccagctgtcagttttgtttttggagatggagtctcactctgttgcccaggctggagtgcagtgatgcaatctcagctcactgcaacctccacctcctgggctcaagcaattcttctgcctcagcctcctgaatagctgggattactggcacacaacaccacgcctggctaatttttgtattttagtagagacagggtttcgccatgttggccaggctggtctcgaactcctgacctcaggtgatgcgtctgccttggtctcccaaagtgctgggattacaggcatgagccactgtgcctggccagcatatatatatatacacatatacatatatatatagacacacacacacacacacacatatatatacacacacacatacatatatacacacatatacatatatacacacatatacatatatacatatatacacgtgtacatatatacgcatatacatatatacacatatacatatatatacacacatatacatatatacatatatatacacatgtacatatatacgcatatacatatatatacacatatacatatatatacacacctatacatatatacatatatacacatgtacatatatacgcatatacatatatacacacatatacatgtatacatatatacacacatatacatgtatacatatatacacatgtacatatatacgcatatacatatatacacatatacatatatacacacatacatatatacatatatacacatgtacatatatacgcatatacatatatacacatatacatatatacacatgtacatatatacttatatacacatgtacatatatacacacatgtacacatatacgcatatacatatatacacatacatatatacacacatatacacatgcacatatatacgcatatacatatatacatatacatatatacacacatatacatgtatacatatatacacatgtacatatatacgcatatacatatacacatatacatatatacacatgtacatatatacacatgtacatatatacacatgtacatatatacgcatatacatatatacacacatatacatgtatacatatatacacatgtacatatatacgcatatacatatatacacatacatatatacacatatacatatacacatatatatacacatgtacatatatacgcatatacatatatacacatacatatacacacacacatacatgtatacatatatacacatgtacatatatacgcatatacatatatacacatatacatatatacacacatatacatatatacacatgtacatatatatgcatatacatatatatacacgtatacatatatacacacatatacatgtatatgtgtgtgtatatatgtatatgtatatatgtatgattaattatgctatgcatttcatctttgaatcatttccagtgctggaggtataaattatacatacttttagccggtagccaaccaggcacggctgtaatcccaccagtttgggaggccgaggtgggaggatcacttaagcccaggagttcaggaccagcttgggcaacatagtgagaccctgcctctataaaacatttttttaaaaattagccaagctgggccgggcgcggtggctcacgcctgtaatgccagcactttgggaggccgaggctggcagataacttgaggtcaggagtttgagaccagcctggccaacatggcaaaactccgtctctactaaaaatacaaaaattagctgggcgtggtggtgggcgcctgtagtcatggctacttaggaggctgaggcaggaggatcacttagactggggaggcagaggttgcagtgagccaagatagcaccactgcactccagcctgggcgacagagtgagactccatctcagaaaaaaaaaaaaaaaattagccaagcgctactagggagggtgaggtgcatggattgcttgagtctccgaggtcaaggctgcagtgagccatgatcgcgccactgcactccagcagcctgggcgacagagcgagatactatctcaaaaaaaaaaaaaaaaaaaaaaaaagactttagagagttctaattcattttatgcatttgttggcaaatttgatgccacaaaggtgcattatcacaacactgactacgtgtgtaggcattatgcatgtacgtaaaaacactgaaacttcctgaataaagagatgttctttttgtacatctccatttatgagaggtaaaatttcttgagatcttggctctttgggcaactgcatatgtggtagtgactcatggaggttttgatggatcttgtcaaaagactctaacttctggactcaagcaatcctcccacctcagcttcccaagtagctgggaccataggtgtgtgccaccacgcccagctaattttttaaatttttagtagctgggcgcggtggctcatgactgtaatcccagcactttgggaggccgaggcgggcagatcacaaggtcaggagatcgagaccatcctggctaacacggtgaaaccccgtctctactaaaaatacaaaaaattagccgggcctggtggcgggcacctgtagtcccagctactcgggaggctgaggcaggagaatggtgtgaacctgggaggcggagcttgcagtgagccgagatcgcgccactgcactccagcctgggtgacacagtgagactctgtctcaaaaaaaaaaaagcatgccagacgcggtggctcatgcctgtaatcccagcactttgggaggccgaggcaggtggatcacctgaggtcaggagttcaagacgagcctaaccaacatggtgaaaccccacctctactaaaaatacaaaattagccgggcatggtgctgcattgcctgtaatctcagctactccggaggctgaggcaggagaatcacttgaactagggaggcggaggttgtagtgagctaagatcgcgccactgtactctagcctgggcaacaagcaaaactccgtctttaaaaaaaaaaaaaaaaaagcagaaacaacaatcctgcctcagcctgcctcctcaaaggtatttatatgaccttgggtaagccacttaccctctctgtgcttcaatttccccatttgtgaaatgggggataacatctctgtgatatcttcttcactctgtgaagctttatgccatgtaatgataggagataagtgtagggcacagagaagcgctcaacaaatgtcacctgttgttactgtcagtcctgccaccccctccccaccccaccaggcatccccagccccgtccagaggtgtaagtcctcagcagagctgaacctcacctttctcttcatcttttccttcttggggggcagaagtgggggcttgtcaagctcccgggagggtgggttccagagtgagggttctgagaggggttaggagaaaatcagcccccaagaacccccaaccctcccgccctccaccctagcctgtcccattacctgaatgggcggtgaggtgggggctgctggtggatgggggaggcccaggacgggggctgtttggtgggggcccactggcacaccggaccagcacccccgggctcagctgcccatcatcccccatgctcccaggaccctcgtctgatggagaacggaacttgggctttggagacgggaatggagcgtggggaaatacatcagatgatctcagagagggcacccttttgcaactcaagtccctgcctccaccagaactaacagctgtggctctgacccacccccccgacaacatcttgtgccccctccagccttcccctgacatccccagcctggacatcaacacacttcagaaactaatgggttaatgctggatatatagcaggggcttcctaggaccagctactgaccagtgtctaagaggctaaatattttgaatccgaccctgaggttgagggatgccacttccagatcccaatgtagccatcatcctggtctccccaattccctgccctggagagcccagtatcccagcatctaaggacctggcctcctggcccccagtggccctgaggccccagcctcccagctctggcccagggccttaccttggggggaagtggaggaggtgtgtcctctgcaggggtggggctgaaacacaaagatgggttaaatagctggggggctggggaacaaggactcggggaagatggcatggttctgggctggaggcccgggactggggtctgaggtgaggaggattaagggatgactggttctgcctggagcagaggattaaaggattaatagccaggctggacatagtggctcatgcctgtaatcgcagtgctttgggaggccagggcaggatggcttgagcccaggaattcgagactagcctgggcagcatagcaagaccttgtctccagaaaaaaattaaaaattagccaggcgtggcaggtgcgcctgtgaccgcagctactcaggaggctgaggtgggaggattgcttgagcctgggaggttgaggctgcagtaagccatcattgcactcctgcacttagccttggtgccaaaacaaatcatgagtttgagaccagcctggacaacatggcaagaccccatcctacaaaaaaatgattagcctgtttccaaaaaaaagactaataacagtaacagcaactcttggaggtggagtgctgacagtgcaccacggctttgcacctttacaccacctagtaacacaggtgacatcagcgccgtggccctgctctccctgtgctggcgccacacacaggctgtcgcacgtgatgggtgaagtgagtgcgcgcacctggatggagcctgactcggcctgtgggctggggagtatgggggcctgggctgactgttgggtctggatctggggctcagtatctggtctttgggagatttccaggtgccaaggttcagcctgagggcgggcaaaaagataggaaaagctgagggctggggctgaaggctggagggtgggtctggggtgagagtgacattcgggaggagtttgagactgggatgtggctgagggtgcagggtcatggaggataggtggggtcaagtcagagattggagcagcagcacattctagaaggaactggggtcagctctggggtggagagcaggtggggggctgacgctgagggtcaagtcaaaagattgtataagaagatggaaggaggccaagtgcagtggctcacacctgtaatcgcagcactttgggaggctgagatgggcggatcatgaggtcaggagtttgaaaccagcctggccaacatggtgaaaccccatctctactaaaaatacaaaaaattagctgggcatggtggcaggtgcctgtaatcccagctactcaggaggctgagacaggagaatcgcttgaacccggggagccgaggttgtagtgagctgagactacgtcactgcactccagcctgggccacagagtgagactccatctcaaaaaaaaaaaaaaaaaaaaagaagaaggtggaaggaaagaaggaaagtgggagctggagctgggatcaggttgggggtcaggggttggaggtgaagggttaagggaggtggggttagggaacagggcctaggtagctgggcagaggggctgcattgagggtctaatcagggctcagggctcggggctagaagaaaggcaggggtgcagcggggtcaggagtggaggaaaggccacatcaggggattgtaggaaggtgggggctgaggtggggcctgtggagctgcaggcagggcctcacttacatgtccacgtcgtcatagtcatcgtcagacgactctgacagttgcttcctgaagggtgacaggtatgagccttgggggccttgtccacattccagccccctccccatcctccctggggtccctgacctggggctgctgctcctgaggtctcgaggaggctgtaggcgagcctgtggggtaggaaaagggtcagcagtggcctcagggaagcaggcggtgtggtggggagtggggggacagcatctcacggtgttggctgggggtctggtctccattcctcggagcttcctgaactccatgtgccgccctagggtgggtgggggaagataacctgctgtgagctgggggcaaggggtaacgagatgggtttaagaacagaaagagtagaattggcgggggggttgcagtcaggatcttggggactgcaaatgatctcagggaactgtcccttggggaaaggggtcttggattacagggacttcatttgggggtcaagtttgggatcaagaccaggtgcagtggctcacgcctataatcccagtactttggaaggctgaggtgggcagatcgctggaacccagagtttgagacctgcctggacaactgggcaagaacccatccctacaaaaaatgattaaaaattagccaagtgactgggcacagtggctcacgcctgtaatcccagcactttgggaggtgaggcaggcagatcacctgaggtcaggagttcatgatcagcctggtcaacatggtgaagccccgtctctactaaaaaaaaatacaaaaattagccgggcatggtagtatgcgcctgtaatcccaattactctggaggctgaggcaggagaatcgcttgaacccaggaggcagaggttttggtgagccaagatcgcaccatcgcactccagcctgggcgacagagtgaaactccgtctcaaaaaaaaaaaaaaaaaaaaaaaaaaaaaacattagccacgcgtggtgaataagcctgtagtcccagctactcaggaggctgaggtgggaggattccttgagcccaagaagtttgaggcttaagtgagctgtgatcacaccactgcactccagcctgggtgacacagcaagatcctgtcacaaaaaaataaacaaataaataagttttgggatcaggaagttgggggctcaatgtagttacagggtgttttcaggatccgtttgggtattgaggttctgatgagatttctgaggtctccctgggaactctatggtcattttgcttttgtttttgttttgttttgttttgtccttgagacggtctcgctcttgtcacctggactggagtgcagtggcgcaatcttggttcactgcaacctccacctcccaggttcaggcaatcctcctacctcagcctcccaagtagcttggactacaggcgtgcactaccacacccggctaatttttgtatttttagcagagacagggtttcaccatgttacccaggctcgtcttgacatcctgacctcagatgatctgcccaccttggcctcccaaagtgctgggattacaggcatgagtcaccacgcctggcctctacggtcattttgtagttcaggtgctgatgagattgtctggggtctcttataggatcagatgatgctgagggtctctggaggcctgatggtaggggaaggtggtctcttaggtctattatagggtcaggtgtccccaaacataaggattctctactcacgacagcagtctgcatctgggatccccagagagctggagcggtgggtggatctgatccgccgagggatagcagggggtagctgggcagaggggcagccacgtcagggctcaagacccccaagcagcctcctaccctgcccggggtccatctgctctctcctgtaaccctctgggcacacagccttttaccaagctccccatcctccctccctgttttccccctaagagaggcagcaggaaggcactgctggcagcaggcacagcctgagaaagaccgagaggtccccagtgctcttgtcagccaaggctctcacctcgggctcctcatcctcaatgtccccaatggagggtcctttcccgggattcttcagtttgtcaagaagatccaggatcaggcctcgattcagcccaggctgggataccagttgatgctggcggagggaagaggtgtccgtatccagagggatggtgtggacagagagggctggtgtggacagagaggactggtacagggccttggggactggactaaaggaatctagctggggagaaggtgccagtgaaggcagagggcggggaaatccagggaactcagaggcctggggtattcttttttgtttgtttgttttaagacagagtctcactctgtcacccaggctggagtgcagtggcacaatccaggctcactgcaacctccacctcctgggcttaattgattctcgtgcctcagcctcccgagtggctgtgattacaggctcgtgccaccacgcccagctaatttttttttttttttttttttttttttttttgagacagggtctcgccctgtcactcagactggagtgcagtggcacgatcctggctcactatagcctccgcctcctgggtttaagcaattctccaacctcagcctcccaagtagctgggattacaggcgtgcgccactatgctcagctaatttttgtatttttagtagagacggggtttcaccatgttggccaggctggtctcaaactcctgacctcaagtgatccatctacctcagcctcccaaagtgctgggattacaggtgtgagccaccatgcccagccgaccggtgggagtctaagacatttttaggaattagaagaatttaggtttctcagagcggggctaggagaattccagagttgtcttggaagagactgtggttccctggggattcaagaggacactcaggacaagtcttgagtcctttgggaatttgtcagttccggcaactcggggtatttgggaaaggtctggggtataacccggagggtctctggtggtcgggggtggtcctgggaaattctgaggcactagggactttggaaaggccacggggactccatggaacaaagttatccatgtcctcgggagttgtggaaggccccagggaatcctaggctgaggatcttggggaagggagggttacactgagcatcttggtggcgctgggtcgtttcttgggactcttagtcagagtgactttgatgaagttgtggaaggcagccgaccttgggaagaagaagccaggttctggatgaggggaccagaaaccctcccatcaggccacccagccccagccctgccctctctcaccctccctcctgttactctctcgtaccatttgcctttttccttcagtcggggaggctggtagccactcttggtcatgaggaagagaactctagaatagtagggaaaggacatggggttcagaccctcaagggggccagacctcatggcttgaggggttcctagtagcattgtggtcagcagagggcaaagtgagaaacagcatggaagtgaggttcaggttttacagtgcaccagggtgcctctcctaagggaagccatttatgaagtgatagagctatggcaaggccaggtgtggtggttcacgcccgtaatcccaacactttgggaggccaaggcgggaggatagcttgagcccaggagttggagaccagctggggcaacatagtgagacaaaaaaaaaattttttttttaaatagctgggtgtggcaatatgggtctgtaggaccagctatgtgagaggctaaggcaggaggatcatttgagccccggcattcaaggctgaagtgaactacgatcgtgccgctgcactccagcctgggtgacagagccagatcctgtctctaaaaataataagaattaattaattaatttaaaaaatgtctgggcgtggtggctcacacctttaatcccagcattttgggaggccaaggcaagtggatcacttgaggtcaggagttcaagaccagcctggtcaacatagtgaaaccccgtctctaccaaaacatacaaaaattagccaggcatggtggcgtgcacctgtaatcccacacttgggaggttgaggtggtagaatcacttgaaccctggaggcagaggttgcagtgagctgagatcttgccactgcactccagcctgggcaacaagagtgggactccatctcaaaaataaataaataaataaaaataaaaataaataaataggctgggtgcagtggttcacgcctgtaatcccagcacctccggaagccaagatgggcagataacctgaggtcaggagttcgagactaccctggccaacatgttgaaaccccgtctctactaaaaatacaaaaattagccgggcgtggtggtgcacacctgcagcctcagctactcgggaggctgaggcaggaaaatagcttgaacccaggagatggaggttgcagtgagccaagattgtgccactgcactccagcctgggcaacagagcaagactctgtcttaaaaaataaaaaataaaataaaataaaatattaaattaaatttaaaaaatagagctgcagcacgtgcaaaggtaggctcaagtggtgatccctgaattggaggttcctgggatggaaggcggaagctgagggtgggctttgggccagggctagacaggatctctgggcctggggaccccacgcctgcctacctgagagggtgcacatcaaagagcggtggctgtagctcggccagttcgatggccgtgatgcccagggaccagatgtcacacagctcattgtatcctcccttcagggccacagctgccacttccggagccatcctgggggcagacacgctcagagagccagaggtggcatggggacaggaagggaaggaggggcagagaaggagaaggagttgaggggagacgcagcacacagagagtcagatggagagacagagggacaggagtaaagacagacacaggcagatgaagacagagatgcagacggggcgcgatggctcacgcctgtaatcccagcactttgggaggctgagcaaggagaatggcttaggcccaggagtttgagaccagcctgggcaacttatcaagaccctatctcggctgggcacggtggcttttgcctgtaattccagcactttgggaggtcaaggcggacagatcacctgaggtgaggagttcgagaccagcctgaccaacatggtgaaagcccgtctctactaaaagtacaaaaattagccgggcgtggtggcaggcgtctgtaatcccagctacttggtggctgaggcaggagaattgcttgaacctgggaggtgaaggttgcagtgagctgagaccatgccactgcactccagcctgggcaacagagcaaaactccgtctcaagaaaaaaaaaaagaacgaaaaagaaaaaaaaaaaaaaacaacaccatctctacacaaattttaaaaattagccaggtgtcatggtgcacacctgtggtcccagctacttgggaggctgaggtgggaggatctcctgagcccaggagttctaggctgcagtgagccgtgactatgccactgcaatccagcctgggccacagagtgagaccctgtctctaaaaacaaaacaaaatgaaaagacagagaggcagagacagagagtgagagagacagaaacaaagagacagagagcactgcaaactgagctagaggaaaaagacagaaatggatatggagggacagagaaatcaagataaaaatcaacacaaacaccgagagcaatggccagaaaagggcacaaagagagaggaaaatggaaaactcaagcgacacccagagagaatgaaagaatcttccaaggagaaaggacgaggcaggggaacggagccaggaaagaggatcccggggaaccagggtaggaaaaaccactgacccccactccacccctagctgcccgctgggcgccactcaccagtagggtgtcccaatgaaagagaggcgtctggccagtgtagccccaatctgggccgagatgccaaagtcagctggaagcagagggagacatagtgatctggggtccactgcgcttccggccccccagtcagcccccctgctcaacccccagccttactcacccaatctgacctccccagcatcattgatgaggatgttagctccctgggaatgagaggggatatgggaggctgcagagactctccccagcccagtgctagcccactccgccagctcaaactaccctgatccctgagcccctgaaatgccactcccatctcctgggccccaccccccaacagcacccctacacccccagaccaccttgatgtccctgtgtatcttcttctgtgagtgcaaataggccagtccctggggagaagggtggacaaggggacagtgagtgtttgggggctggagtggggccaccctcccctcccatccccagaatccccaggcctctccttacctggagcacttcccggcagacatagctaatctggagctctgacagggagcctgtcactgcaaaggtcaccccggccaggccaggcattggatgggagccagggaacctgggctggggagtcctgcccccccacaccagctaagagggtgccatagggagaggggaaataggataggaccagtgggagggggagatggtggggtggtcagtgacagaaagaggcagcaatgcaaataaaagaggccaataggcctggcgcagtggctcatgcctataatcccagcactttgggaggccaaggtgggtggatcacttgaggtcaggagtccgagaccagcctggccaacatggtgaaaccccatctctactaaaaaatacaaaaattagccaggcatagtggtgcatgcctgtaatcccaagtactcaggaggctgaggcaggagaatcgtttgaacccaggaggtggaggttgcaatgagccgagatcgtaccactgcactccagcctgggcaatagaaggaggctctgtctcaaaaaaaaaaaaaaaaaaaaaaaaaaaggaaagaaggaaagaaagaaagtaagcaagataaataagtagaatatgatatagttcctcagacgctgatagacagcaagaagaaacataaagcaagaaaggtgcgcgtaggaggagctatgacatttcacagaggtggtcagtcagggctgctctctgaaggtgacagtgggtgaagacatgagggctcccactctgagtgggaccagccacagcaagtgcagggccccaggtgggatagtccctggtgggtctggaaagcagcaaagggggtggggtggagtggagggggaggaggaaagtgggaggaggtgagattggccagcatggggtggaccctgatgaggagtctgggcttctcctccgagagaaatggaagctgtaggagggctctgagcaggggcgtcatgtgactttgcaaaataaggaaaggcacagagacagagagagacagagaaacggagacagatcatacatgagacatacaaaaggaacaggattgaaaaaaacaaaaaaatgagacagaagacaaagacagaggtcagaggccaaaatatggggagacagacagatttagagagagacccagagggtaacgaggtaagaacaacacacaggcagagagacagagagacagacagacagagagaggccgtcagacatcaggtctgacagaccagctgtgggattcacttcctctctttgggcctcagtttccctcctgaggacttctcaatgacgtccttccttttctaacatttgaggtctagggctggaaggaatcagaggttttccgcctcccagaatcaaacgattctcctgcctcagcctcccgagtagctgggattacaggcgtctgccaccacgcccggctaattttttgtatttttagtagaggcggggtttcaccatgttggccaagctggtcttgaactcctgacctcaggtgatccgcccacctcggcttcccaaagtgctgggattacaggcgtgagccaccacaccaggcccagcagttatattaaaaaaaaaaaaaaaaaaagccaggcacagtggctcaagcccgtagtttcagcacttcgacagctgaaggcaagaggatcagctcagcccaggagtttgaaatatggcccagaaagacagttcctgtgagatacacacacagagacggaagaggtgaatttgggtcggggttggggggtggggatagggaggggtgcttgggtcccgttgtcctttctctaaccttggtagatgtcctggagagaaccagccccacagaattccatgcagatccagagtttctgcaacctgcagtggttcaagagtaagaataataatagcagtaaatacattattatttgcaggaaagcccctggtttgcttctgtcttgttctagttcaataagaactttaacgtaacagctctcatcactccacctctccttgtctaccagagtgaggttgtttcattcccattttacagacaaggaagttaaggctcagagaggaaatgtgagttccggggcaagtcaactcaaacctaggcctttgggcgggaccccactgccgtcccacgccaacctaggaggcagggcagagatctcacgggttgtggagatttggaggggacagaggggcccagggcacctgttctggggagcagaggtcattattggggcatctggaatattaatttggggatcagggaatttaggagtttatattaaaggagcagagagtgaaactgggtgagccaaagagcagaatggtgagagcttcgtttcaagggagttgatttcaaattcagttactatgaagagatcaatttggggtactcttggtcagaaatgggaattttagattggagattagattagaggctgctctggtcagaaaagtgggacttaggagtgaggatcatggtagggttagcccagtcaaaaatgggggtccaggatgggaggtcgggttatggtgagaaatggaagttcaaggttagaactgagggtgccaagaccaggcgcggtggatcacacctgtaatcccagcactttcggaggccgaggcgagtggatcacaaggtcaggagttcaagaccagcctggccaagatggtgaaaccccatctctactaaaaatacaaaaatttgccgggcagggtggtgagcgcctgtaatcccagctactcgggagtctgaggcagagaattgcttgaacccaggaggcagaggttgcagtgagctgagatcatgccactgcactccagcctggcaacagaacaagactccatctcaaaaaagaaaaagaaaagaaaaaaaaagaactgagggtacccccatcaagaaatggggactccgggttaggggctgggctgggtgccagggtgggtctgaggttcatcaccagagataactcccatggtaggccacgatgttggcgtgccggcaagttttcaatatgaggatttccttctgaagggtggagacatcatcatctgtgaggagggcgggagagaaaaggcagctcgcatggggagagagctacaggggaggtgatcccagtgtcccaggaggcgaaggtggggatgtggggaaggagctccatgttccctcctcaccaggctccatcttcaccatcttcagtgccaccaggtcccctgacaccttgtctcgagccttgcaaaggggaagttggcagtcaggcaggctccatttgccagagtccctccacagcatccctgagtcaaggtcaagaactgggaccccctcttgcagcctcctccctgccgagggcttgccttaaaggtcactggttgtagggtgttggggacagaggggcttcctcaccttaaagacttccccatacgtgccgccacccagccgctgtagcaggtcatagtggtcccgggggtctctattgaaaatgtcagggtccacgacgtccatccctgggggcctgagctgggcctgcgcccaggggccagcagggcctcagggctcaacttctggcacctccctccgtccccagaagccctgcacccgccttgcctccgcgggctgtggcctcccccctcctcactctcgcttcctgccccagctgcactgcacgactgtgcaacgggctccacccccccgtcccctgggctctgagagcctctgaggggcagcttgtcttgggacccaagggaccaccctcaacctccaaggcccagggctggatgtaaatgtgatgcaaatgatcttaatcgtaactgggttggaggggggtgccttagaacccccgcccccgtctcctaggtagtgtctaaacctctgctgggtgcttgaaggtttggccacaacccgaaggcggcaggtctgcaaagggatggctatgcagtgtacatgcctgttcacctgtcacatacatgcacttgggttacctcctctgcactgcgcaggcgtgtagacgtgcatctgcctggatacctgtgtgcacagtacacacgtggatgtacccaggacatatacctccacatgcatggcacataactgcattttgtaggcctgcagtgtacaaaacctatacataatatataattcatggcagtacaaatgggacgctcgccctcagctccaagaccggaacctaatggagacggggcgcgatccggcgaagtccaggagccctcaccccagcccctgcccggcagagcacagtagctttgtgggaccctcctcctggagctggggaccaagggctgagacttgaaactggagagctcaggatcctgcaccaggcgcccaggcctgtggcaagagggacctcagaacacctccctcggaacttggccatggcctaaacgtaaggctgctgcgtgcattcccgcagagctccgtggcctcatggccgcgcgcaatacaacgcgcgcgcacgccgccagagctccgggtgcttcccggtgagttcgcgcgcgcacgctcccgcgctaccggcactggaactgggtctgtgaggcccgggaaaagcttagccccgccccctcgccacgagaggcgcctgcgcactgggatccagtaagatttttctcacgctgtctgtccagcttgagtggcgcgaatgcgcacgcgccaattgcgcctgcgaggaagaagtcacgtggcagccggaaagcgtggcggctgctgctagagcctttccctttaccgcacccaaggagctggagcgacaacaacgacgtcgtttccgtttccaccacctcttcctgttcccgtccttgaggacgccgtgccgggtcagtgttagcctccagccctggttgtggaaggcgacagaagtcatggcgatgtttgagcagatgagagccaacgtgggcaagttgctcaagggtatcgacaggtctgagcccggttggaggaagcgctctggccaagcggggcggaggagagggttttccggagacagcaaggggtgttcagggtcctgggcttgccgcggggtggggtttctctatcctcctggaggaggagatgcttaaagaaacggcactgagctgggggtagtggctcacgcctgtgatcctagcactttgggaggccgaggtaggtgggtcgcctgagcccaggagttagagaccagcctgggcaacagccaaaccccgtctctaaaagaaagaaacaaaagcactgcaaaggcctagaagcgagagaatcttggtaccactcagtctcttcgtaaattgccttaaggtttccttctctgctccgcctcctttgagtgcctcttaatctctcccttctctgctctataagtcattcattctccacacgtttactgaaataaactgtcagtgctaggcaatgctgggaaccacaggcgaatcagacagcggcagatcatgccttcacggtctgagttccctttccataagggagacaaacctgacagcagacagcgatagccgggagagattagaactgaaatgggggaagcaaaggccagagtgttcaggtggacatggaggaagtaggcagcgaggtaggcaggagaggatggggctggatcagggtggaggcctgaacaggggaggaaggggtgagtagcagagacattcaggaggccaggtgtacaagctgcagtgactgactggctcagaggttgaggaggcatcctagggaagagccagggctccagtggagtttagagcttaggcgagaggtctgggataagaataagttttactagagattatactggacataattcactacctggatagagcaagtggccagtgccagatttagaggggaagggcgggaggagcaggttacagtggccccttgctccataaggtggctggcctcagcttctgtctcctctgtgctcacctatcttgattctcctttaggtacaatcctgagaacctggccaccctggagcgctatgtagagacgcaggccaaggaaaatgcctatgatctggaagccaacctggctgtcctgaagctgtaagtgtctagctctctgtctacactcccattgcagcaactagcagggtgccactcccagtacagggcaagggggtggctggtagtatcctgaacaatgcagcatctcttggtgtgcaagactaggaagccaaggaagttgggacaggaggagggatggtttttgaaaaatcaattgccgggcgcggtgactcacgcctgttatcccagcactttgggaggatgaggcaggcggatcacctgaggtagggagtttgagaccagcctggccaacacggagaaaccccatctttactaaaaaataccaaattagccaggcgtggtgccacatgcctgtaatcccagctactcgggaggctgaggcaggagaattgcttgaacccaggaggcggagattgtggtgaaccaagatcgcgccattgcactccagcctgggcaacaagaccgaaactccgtctcaaaaataataataaaaaatcaattagggtggccgcaggggctcatgcctgtaatcccagcactttgggaggctgaggcgagagactcacttgagccaaagagttcgagaccatccatggcaacatagcgagacccaaccctacgaaaaaatttaaaaattaatgtagcggtgtgtggctgtagttccagctacttgagaggctgaggtggaaggatcgcttaagcctggaagattaaggtgcagtgagccatgatagtgccactgcactccagcctgggggacagagtgagacccctctttttaaaaaaaaaaaaaaaaaaaagaattaccaatttgggtgacatggcacaaccctgtctctacaaaaattagctgggcccagtggcgcatggctgtagtcccagctccttgggaggctgaggcaggagaattttttgagcctgggaggcagaggttgcagtgagccaagatcataccactgcactccagcttgggcgacagagtgagaccctgtctcaaaaataaataaaggttaattacagaacacatgtacaggctaatacattaagcaaacatgtagtttaacaaatcattataaatgaaagcctacataatcaccatttatgttgcaaagttattgctagcaccacaggctctttgccccctatgctctatgccaaccaattcccctgctcccccatgctctcatggcctggctttatgtgatggtttactatgcatgcatacatctggctcagctcagctcaggtttccctgctttgaacttgatacagatggagtgcatacagcacaaactcttctgcatttgccatttgctactcagcactgggtttgtgagatccatccagtgttttttgtttttttgttttgtttttgatatggctgcagtttgttgtcatggatgtatagctctccactgtgtcacttgtgtggctgtcctaatgatctcttctggctcttgatggacattgtgggttcttcgtgcccttttttttttttttttttttttggagacaggatcttctgttgcccaggctggagtacagtggcacagtcatggctcactgcatccttagccttctggactcaagtgattctcccgcctcagcctcctgaatagctgggactacaggcatgcaccaccatgcccagctaattttacttgggtgctttctttctttccttttttttttttttttgagacagggtctcaccttcttgcccaggctagagtgccttggcgtgatctcatgatctcaactcagtgcatcctttgcctcccaggttcatgtaatcctcctgcctcggcctcctaagtagctgtacgtatcggggggcctgccccgataatcacgtaggttcttttctatattcctaagcattggctggcttgagaaatagaaggacagagtacaaaagagagaaattttaaagctgggcgtccgggggagacatcacacattggtaggatccgtgatgcctcacaagccacaaaaaccagcaagtttttattagggattttcaaaaggggagggagtgtgcgaataggtgtgggcgacagacatcaagtacttaacagggtaatagaatatcacaaggcaagtggaggcagggcgagatcacaggaccacaggatcaaagcgaaattaaaattgctaatgaagttttgggcaccactgtcattgataacatcttatcaggagacagggttttgagatcaaccggtctgaccaaaatttattaggcgggaatttcctcttcctaataagcctgggaacgctatgggagacgagtttatttcacctctgcaatctcgactataagagacaggtacgccccggggggcccgttcagagacctacccctaggtgcgcattctctttctcagggacgttccatgctgagaaaaagaattcagcgatatttctcccatttgcttttgaaagaagagaaatatggctctgttctgcccggctcaccggcagtcagagtttaaggttctctctctcattcccggaacaattgctgttatcctgttctttttccagggtgcccacatttcatattgctcaaacacacatgttgtgcaatttttgtagttaacgcaattattacagggtcctggaacgatatacatcctcctcaactgacaggattaagagattaaagtaaagacaggcataggaaatcacaagggtattgattggggaagtgataagtgtccatgaaatctttacaatttatgtttagagattgcagtaaagacaggcataagaaattacaaaagtattaatttggggaactaataaatgtccataaaatcttcacaatccacgttcttctgtcatggcttcagccggtccctccgtttggggtccctgacttcccgcaacaggtacgcaccaccatacccagctaatttttgtatttttagtagagacagggttttgccatgttagccaggctggtctcgaactcctgacctcaggtgatccacccgccttggcctcccaaagtgctgggattacaggcgtgagccactgcacccagcctaatttttgtatttttagtagagacggggctttgtcatgttggccaggctggtctcgaactcctgatctcaggtgatccgcccatctcggcctcccaaagtgctgggattacaggcttgagccacccacctacccacccccaccgccaccttctgttgtcctcttttgcaagggaggaaaccgtcagcccctcagtttcctttctctgctcctcagcctttcagtgcctcttaatctctctcttctctgctcctcgtgtcataaataagcagtccaaggtcactcagcagggaagtttaaaccgaggcagtctggctctggttccttagccactactccagaccactgctgctgttctcatttgtttataaatcacttagcagtgtctgccccattgggtagttgtgagcattaactgtccctgttcacagaggagaaaggtaggctcagggaggtgaaggttacacagctgggaagcactgggactgggattggaacccaggcatgtccaattcccaaactccagaataaagcagctgcctggcacctggtgaggattggggacttggaggtgccactgtggccacgtctcttgttctttttcttaggtaccagttcaacccagccttctttcagaccacggtcaccgcccagatcctgctgaaggccctcaccaacttgccgcacacagacttcaccctgtgcaagtgcatgatcgaccaggcacatgtatccttccagcactggggccggggggtgtgtgggaaggggtcagagtcaaggtgcatgaattcccagggagatggtctgtgggtgtatccacaaacaacaagtgcctgctctggtccagcgtggcaaggtgctggacagtgctgggacactggtgactgagacagtcctgggccctgtcttcacaaagttgtcgcagtccagtgaagagtcagtgatagactggagtggtcagggttgggttacaagagtcacagcagccgggcacaatgactcaggcctctaatcccggcactttgagaggtcaaggtgggtggatcacctgaggtcaggagttcgagaccagcctggccaacatggcgaaaccccatctctattaaaatacaaaaaattagccaggcacagtggcacacacctatagtcccagttactcaggaggctgaggcaggaggatcacttgaagctgggagatggaggttgcagtgagccgagattgcgccactgcactccaccctgggtgacacagtgagactctgtctcaaaaaaaaaaagaagagccagagtaggcacctgaccatttgggtgggggaatatgtggacatgaacacagccatctgtatttacattctatagaacaatgtctggaaaggtggaaaggtacccaagaattggaaatgactgttacctcccaggaaggatggctgtgagacagggaagggaagacctattttgccactgttcactcttctgtatttttaactagaaactataaaccagggcctcctggaggagggaacatctaaaacataacgagttaggtggaggggtaggcaaaggtgatccaggcagagaggacactcatgggctaaaggaagcagagctcggtgctgtctttcaggaatggtagaggaagcctgacataggaatgatttaaggtgggtttttttttgttgttgttttattttatttattttattttttttttgagacggagccttgctctgtcacccagtctggagtgcagtggcgtgatctcggcttcctgcaacttccacctcccaggttcaagctattctgtctcagcctcctgagcagctgggaccacaggtgcatgcatgctaccacgcccagctaatttttgtatttttagtagagacggggttttgctatgttggccaggctgctctcgaactcctgacctcaggtgatccacccgcctcagcctcccaaagtgataggattacagatgtgagccaccgtgcccagcctataggttttattttattagtaataatagtagggtttttttgttaatattttctttttttttgagatggagtcttgctctgtcatccaggctggcgtgcaaaggcgtgatcttggctcactacaacctcctcctcccgggttcaagtgattctcctgcctcagcctcccaagtagctgggactataggcacgtgccaccacacccagctgcttttcgtatgtttagtagagatggggtttcgctatgttggccaggctggtgtcgaactcctgacctcaggtgatccacccgccttggcctcccaaagtgccaggattacaggcgtgagccaccaggactggcatgtcatttctcatcttttgccattacaaacagtcctgcagccaacatcctttctcctgcatacacctgcaggagaaataagctggcttccttttccagctgtttttctgagctgaagctttggaagaaagcagccagaagaaggtaggtggggaggggtgatctggggtccaaccttacgctccgaggccagttttccttaatgcttcctcctcccagcaagaagaacggccaatccgacagattttgtacctcggggacctgctggagacctgccatttccaggccttctgggtaacttccctggggtccaggggcaggggagatggcagggccatgtggagctgagtgctaaaagtaacaacggtgcacactgactggcttcctgctttggcggtgggcccagtgctctgcatgtgtgtgtttgtggaattatcatcctctcgcggagcaggtactcacaggtcatccccgtgcccacaggctgaggccgaccctttcccctttctcccatctttccactgagccctctagtacacaccgttgatcagaagtcctccagtggctgggtgtagtgactcacccccgtgattccagtacttgtggaggccaaggtgggaggattgcttgaggccaggagttccagaccagcctgagcaacatagtgaaacttcatctctacaaaattgaaaattaattgggtgtggtggcatgtgcctgtactcccagctacccaggaggctaaggtgggaggatcgcttgaggctgcgagtgagccgtgatcacaccactgcactccagcctgggcaacagagcaagaccctgtctcaagaaagagaaattctccgtctcttctacctgtctgacatgctctgcccttcttgctctaactggaacctggccccccacttctgcagccccctaagtgggaggctagatcacctcctggctcctatctcttctgataccctcagtcttttttgttgttttttgtttgtttgttttttggtttttttgagatggagtctcacgccattgcctaggctgtagtacagtggcacgatcttggctcactgcaacctctgcttcccgggttcaagtgattctcctgtctcccgagtagctagtactacaggcacacgccatcatgcccaactaaattttatatgtattttttattttattttgttttatttttgagacagagtctcagtcttgcccaggctggagtgcagtggcgcgatcttggcttactgcaactgccgcctcccgagttcaactgattctcgtgcctcagcctcctaagtggctggggttacaggcatgtgccatcacgctggctaatttttgtatttttagtagagacggggttttgccatgttgtccaggctggtcttgaattcctgacctcaggtgatctgcctgcctcagcctcccaaagtgctgggattataggcgtgaaccaccacgccgggccagaaacccccagttttgaagtgtgtgtgtcgtcacttcctgcccggtatcagtccctctggtgactgctctttgtttcttgaagaattcagcccctggctggccacggtggctcaacgcctgtaatcccagcactttgggaggccgaggcaggtggatcacctgaggtcgggagttcgagaccagcctgaccaacgtggagaaatactgtcttaactaaaaatacaaaattagctgggtgaggtggcacatgcctgtaatcctagctgctcgggaggctgaggcaggagaatcacttgaacccagtgggttcaacctcacccagaggttatggtgagctgagatcatgccgttgcactccagcctgggtgacagagtgagactccgtctcaaaaaaaaaaaaaattcagctccttctcactggcgctctctaccactcctgccctaattcttagacgcttagaaagtaacacagaggatcctttgaccacccagacctctgggtcccttgctctcttggccagctatcttgtgctacacctgacctcagcccttctcttccaatcataccccaggccagttctctgcacattagacctctgaggcatttattttctttcctttttttttttttgtttgagaccatgtctcgctgtgtcacccaggctggaatgcagtggcacaatctcaactcactgcaacctctgcctgctgggttcaagcaattttcctgtctcagcctcccaggtagctgggactacaggcatgcaccaccccgccggctaatttttgtatttttagtagagacggggtttcaccatgttggccaggctggtctcgaactactgacctcaagtgatctgcccgccttggccttccaaagtgctgggactacaggtgtcagccaccacgcccggacctctgaggcatttttaaaaattaatactgatacttgggtcctccctcacagagtctgatgtaattgcttcagtgtagcctaggccttgggattttaaaaggttaccctgggtgatttggacatctggccaatgttgggagccactgccgtcaccaataatggctcccctcctccctctgtgagtttccagcatctccattctctgaccgcttcctcctagcttctcagctcacccccacagggtctccatccccacattcttgggcctgaccattagctccaaccctctttctctgcaggcttctctgttccgcttccttctcttaaatcgcatgtgctggctgggcatggtggctcacacctgtaatcccagcactttgggaggccgaggtggatggatcgcctgaggtcaggagttcgagaccagcctgaccaacgtggagaaaccccatctctactaaaaatacaaagttggccgggcgtggtggcgcatgcctgtaatcccagctactcgggaggctgaggcaggagaattgcttgaacctgggaggcggagattgcggtgagccgagatcatgccattgcactccagtctgaaaaagagcgaaactccatctcaaaaaaaaaaaagagaaaaaatgtcgcatgtgactcccctgtccccagctgcagctacggtcttgcttccttccccaactcctggatgtttcctcatgctttatctgtctccctttcttctcacctcaacttatgatctggcttcttgtctcgggagaaaatggaagcagccactgtagaaattgcacctgttcctatcccagaccctgacattttatgtgcagctgactgcacacttttttttttaattcttaaacattttattttttattcaagtaagaaattattgattagcttcagttaatcccacaaagaaaatgatcaaatgcttaaaataatagagtttactagttctacaactgttctcactagcaaactagcaaatgagatgtgttggagatcttagacctattccatggaacagatagacaggttttttttgtttgtttgttttgttttgttttgttttgttttgttttgttttgttttttgagacagggtctcactctgtcgcccaggccgcagtgcagtgatgcaaacacagctcactgcagctttgacctcccaggctcaagtgatccccgcacttcagcctcctgagtagctgggactaacaggcccacgccaacacgcctggctaatttttctatttgtagtagaggttggatttcgccatgttgaccaggctggtcttgaacttctggcctcaagtgatcctcctgcctcgcctcccaaagtgctgggattacaggttgagccaccacgcccggccacaaatctggatttctgcccacctcactggctacaccttcccggcatccatgtgggggattccctcccttttgttggagagaacctataccacagacctaacctttgagcagaaatctgaaggaggtgagggtggtagccatggaggagaattccatacacaggccctgaggtaggcgggtgtctggcgggtttggggagcagcagggaagcccctgtggctggagcagggtgagtgagtagcgagtaggtggaggtgagggcacagaggtgacaggcagattctgtgtggcctaatgggctatggtaggaaaattggccttttctctgagtgagacagaagcaaggggaggtggctgaatacacttagccaatatgtgtctgccccctttctcagggctctggtttctgcctgccaggttcaagcctcacctccaggatttttggaaaatcatgtagctgccctggtctcctcatctctaaaatggatataacttacatcacatggctacacttagaagaatggctatagcatgtggggtcagtgctcaaagtggtagctgctttttttttttttctgaaatggagtatggctctgtcgcccaggctagagtgcagtgatatgatcttggctcgctgcaacctctgcctcccaggttcaagtgattcttctgcctcatcttcccaagtggctgggattacagatttcaggcatccaccaccacacccggtttaattatttatttatttatttatttttttttttttttgagatggagtctcgcgctgtcgcccaggctggagttcagtggcacaatctcagctcactgcaacctctgcctcctgggttcaagtgattcttctgcctcagcatcccgagtagctgggtctgcaggcacatgccaccacacctggctaattttttgtatttttagtagagacgaggtttcaccatgttagccgggatggtctcgatctcctgacctcacgatcgcccgtctcagcctccccaagtgctgggattacaggtttgagccaccacgcccagccagcctaatttctgttttttgtttgtttgttgttttttgttttgttttgttttgagacagagcctccctctgtcgcccagtctggaatgcaatggtgtgatctcggctcaccacaacctccatctcctgggttcaagcgattctcctgcttcagcctcctcagtagttgggattacaggaatgtgccaccacgccctgctaattttgtaattttagtagagtcagggtttctccatgttggtcaggctggtctcgaactcccgacctcaggtgatccgcccgcctcagcctcccaaagtgctgggattacaggcatgagccactgtgcctggctgatttctttatttttagtagagacagggtttcaccctgttggccagggtagtctcgaactcctgacctcaagtgatccacccacctcagcctcccaaagtgctgggattataggtgtgagccaccacacatggcctggtagctgctattcttgttaacattactgaaggggtgggttgcccctccacacctgggagtgtttctcgttaggtggaatgagagacttggaaaagagacatagagacaaagtatagagaaagagaaaagggggcccaggggaccgcgttcagcacacggaggatcccaccggcctctgagttcccttagtatttattgatcattattgggtgtttctcggagagggggatgtggcagggtcataggataatagtggagagaaggtcagcaggtaaacacgtgaacaaaggtctctgcatcataaacaaggtaaagaattaagtgctttgcttttgatgtgcatacacataaacatctcaatgccttgaagagcaatattgctgcccgcgtgtcccacctccagccctaaggcggtttccccctatctcagtagatggaacatacaatcgggttttacacgagacattccattgcccagggacgggcaggagacagatgccttcctcttgtctcaactgcaaagaggcgttccttcctcttttactaatcctcctcagcacagaccctttacgggtgtcgggctgggggactgtcaggtctttcccttcccacgaggccatatttcagactatcacatggggagaaaccttggacaatacctggctttcctaggcagaggtccctgcggtcttccgcagtgtttgtgtccctgggtacttgagattagggagtggtgatgactctcaaggagcatgctgccttcaagcatctgtttaacaaagcacatcctgcaccgcccttaatccatttaaccctgagttgacccagcacatgtctcagggagcacggggtaaggttacagattaacagcatctcaaggcagaagaatttttcttagtacagaataaaatggagtctcctgtgtctacttctttctacacagacacagtaacaatctgatctttcttttccccacacattactgataagaacgttgttgataggtaagattaccagtgtaggctgggagtggtggctcacccctgtaatcccaacgctttgagaggccagcgtgggcagatcacttgagcccaggagtttgagatcagcctgggcaatatagtgagacctcgtctatgtaacaacagcagcaacaaaatcttagcactttggggggctgaggcaggaagatcacttgagcccagaaattcaagaccagcctgggcaacgtagtgagaccccatctctataaataaataaaaataaaagcaaataatttaaaagaataaacattgtgaacatcaattcccatcacagcaagccctggatgaaaacatggacctcttggaaggtataactggctttgaagactctgtccgaaagtgtaagtccctctctgaggctgggctccccaaggggaaggggtagggagtggcagccaggtccggggggacagctgctcaccggttttgtctctgacctccacagttatctgccatgttgtgggtatcacttaccagcacattgaccgctggctgctggccgagatgctcggggatctgtcgggtaacgccctctgggtcctggtgcacatctgggaggttgggggtggctagggcagtggacctcagtcagctcctccaacaggcctgtctgggtctcatcaggtcagcatggaaggcccagcccaaggaggaaataagaacttggtataagacagtctctgccttgagggagatcctatgccatttgctcatttattttgcattaattgagtgcctaccgtgtgtcagtgtgctaaactgggcgtgcagcagtaaacaaagtgggatggctccaattcattctcatggaggtagcaaagcacatggcgacatggaggtgtccagtggtgattcctgtcatgaaggaaagcaagacagctcacagaccagcggcatctgagcccttacctccgtagagagaggcccgtggcctgaggtagtgcagaggaggatagtagagcagggccctgacttgtaacgttcatgggtagccagggtgtatgtggccagagcagagtaagcatgggcgaaagtagagagctgggggttggaggggcatttccaggtcatgtggggcctcgggaggaccttgtcctttcccctgactgagaaggagccaccggagggctctgagcagggtagggctctgatcagatggatattttttaaagatccccccaagaacaaaaaaagaaaaaataacttatttgcttacttttgtaaaaagaaacgtagaaaaggaagtcaagaaactaaggaaggccgggtgcggtggctcccgcctgtaatccagcactttgggaggccgaggtgggcggatcatctgtggtcaggagttcgagaccagcctgcccaacatggtaaaaccccctctctactaaaaatacaaaaaattgctgggtgtggtggcgtgcacctgtaatcccagctacttgggaggctgaggcaggagaattgcttcaacgcaggaggcggaggttgcagtgagctgagatcgcaccattgcactagtgataagatcgaaactccatctaaaaaaaaaaagaaactaaggaaggccacgtgtgatggctcataccagtgagggaggcagatcacgtgaggtcaggagttcgagaccagcctggccaacatggggaaaccccgtctctactaaaaatacaaaaattagctggacgtgttggcatgtgcctgtaatcccagctattcgggaggctgaggcaggagaaccgcttgagcccaggagcagaggttgcagtgagccaagatcacaccactgcattccactctgggcacttttagtagagaaggagtttgaccatgttggccaggctggtcttgaactcctgacctcaagtgatctgcccaccttggcctcccaaagtactgggattacaggcgtgagccgctgcatccagccaagtaaaagctaactttttttttttttttttttttttttttgaggtggagtctggctctgtcacccaggctggaatgcagtggcataatctcggctcactgcaacctcctcctggtttcaaacaattctcctgcctcagccttccaaatagctgagactataggcctctgccacctcgcccagctaattttttttttttttttttttttagcagagatggggtttcaccacgttggccaggacttggcacggtggctcacacctgtaatcccagcactttgggaggccaaggtgggcggatcacctgaggtcgggagttcgagaccagcctgaccaacatggagaaaccccatctctactaaaaatacaaaattagccaggcgtggtggcgcatgcctataatcccagctactcgggaggctgaggcaggagaattgcttgaacctgggaggtggaggttgcagtgagccgagattgcgccattgcactccagcctgagcaacaagagcaaaaactccgtctcaaaaaaaaaaaagtgtattgtttctggtaatggtcatgttataattttgcaaccgtttcatataggttgtgggaaaaggtagataaatacgctgctcttgttaggaaccaaaatttgcccagggagagaaaacagaggaatagaaattaaggcagaagccccacgatgaggctgaaagagctcacaggctccctctggcggccattcagagaatgacccgtggaagggcaggggcggaagcaaggagaccaggccagctgctgctgtccaggagatgtcagtgggcaaggggggctgccctggcttcctgagccatgactctgttgcctctcagtcccctggaactgtgggatcaggctgactgaagccccttgctgcccctgtcacctgcagacagccagctaaaggtgtggatgagcaaatacggctggagtgccgacgagtcggggcagatcttcatctgtagccaagaagagagcattaaacccaagaacattgtggagaagattgactttgacagtgagtggtgacccacggcctcgggctttggggctaagggggtgcccctcaagggaggccgaggcaggggcccagaggacctgggtagatctgctcgtgttctgggctgggaagtctgcacctgccagattccattcaccttgtgtcttggggctcccgcccaggaggaatagcggggagctgggtgatcttccctggaacttctaggccctgtgtcctgccccatagcactcagcaagacttcctggggcccagcggggcctcacagggggtctctgcacccttatttgtccctgaggcctgtctcgttggccatcttttattcttggggtgcccaagcctcatgtgcagacttggaatccggtgaacagtaggaatcttgattctctagtttgggtgattccacatttttgtgcctcagttttctcatctaaaaaatggggacgactgcaacagtaactatgataaacactgtgtaggtccttacacttacatcatttgatcctcagttgctaaatgatataaatagtatcatacctacctcatggcatcataagtgtgaatgcatgtataacacttagcaaagagctaagtgaccacacagttcattaaatgttcattatgaccatcgtctacacacatgtaactaacacaggctcaactgcttgctcaactaaaaagattgcagtggctactccggcagcgggtgctgcttcactgccgctcatcatggcactgagcagatgtcctggagccagggagaaaggcacaggcgggctgctgccttcatcccgggtctcccccacccgcttgagtgtgattcaggtgttttaaagatgtgtttggtacaacgtggtttcttaacacaaaccagctaattttgtacttaactggggaacagcattgagcaggcagccatctgcgcacttgcagcccgtggtatctcacctctaaacgccgcgtgactgctgtgtcggggttctcagtgagaactccagcaaaagattctgtagtgaggaaagggcctcctttcttctcccctttggcttctgttgccccaccccaccttcctgaccttttaggtcacaggtggagagggcagtgctgagtcaacaaggaaaaggaggaggaaggtgtgaatctcagggaagtaggagcccagccctgccgggggagtagacgggagggttccctctgtctcagttctggctccattgctctgtgtcctgggtcaaacaggataggttcaaaatactcaggaggctgaggcaggagaatcacttgaacccggaaggtggaggttgcagtgagccaagatcgctccactgcactacagcctgggcaacagaatgagactgtgtctcaaaaaaaaacttaagagtatcctgcaaatagtacctagtaaatattatcatgtaggtaattacaaacaacacttccttggcactttgttctaagcacctcgtttggtcctacaatcctataaggtaggtgcttcttaaagataggaaggtaggtgatgctcagagatgttcagtaacttgtccaagtgacccagctgttaattggcagagctgggatttgaacctagccctccttgctccagagtccatctttttaaaatactgcaccaaactgcctttgtgatggtaactggggcctggaaggagtttatgatctccccctaaagaattgtgggtgctgtagcaggtggctggaggtttgtctcccgcccttctcaccttcagtctggtctctccttccccacaggtgtgtccagcatcatggcctcctcccagtaacttcaggtgtttaataaagatgtgttgactcagccctactgtctcctccctggcttcctgcctctgccccttgcccaccagagggagctcaggagcaggcctctgctctgggttggcccccgcaccgtacccccagcccccaccacaccacaccccatggcggggtttccgcctcctttttcccctgcttcgacttcctcccttgccccaccctaccttcctgaccttttaggtcttgggtggggagggcagcattgagtcagcaaggaggagggagtatgaatgggatgtggcagcccagccctgtggtggaggctgagcacctctgggaggagtgaaggtgaagtttccctctgtcttgatggtggctcttgctttgtgaccttggtcaagggactgtgcctcttttttttttagacgaagtctcgctctgtcgcccaggctggagtgcagtcgcgcgatctcggctcactgcacgctccacctcccgggtttatgccattctcctgcctcagcctccagagtagctgggactacaggcgcccgccaccatgctcggccaatttcttgtatttttagtagacagggtttcaccgtgttagccaggatggtcttgatctcctgaccttgtaatctgcctgcctcggcctcccaaagtactgggattacaggcgtgagccaccgcgcccagccgggattgtgcctctctaattctcagtttcttcatctgcagaaggggaagaataatgcacccttctgaaacctgtgagggtttctccggcccttgccagtaaaggcctgagattggggcctgtcctgtcctgtccttgctcttagaaaatgtgagccacaggccgggtgcagtggttcacgcctgtaatcccaacactttaggaggccaaagcaggaggattgcttggccagagtttgagaccagcctgggcgacagagtgggactccgtctcaatatatatatatatatatatatatatattttttttttttctttttctttttcttttttttttttttagagacagagtctcactctgtcgcccaggctggagtgcagtggcgcgatctcagctcactgcaacctttgcctcccaggttgaagcaattcttctgcctcagcctcccaagtaactgggactacaggcacacacctccacgcccggctaatttttttgtattttagtagagatggggtttcatcgtgttgcccaggctggtctcgaactcttgggctcaggcagtctccctgcttcgacctcccaaagtgctaggaatacacacgtgagccaccgcgcctgaccaaaaagtttattttaaatagctaggcatggtggcgcgtgtctgtagtcccagctatttaggaggctgaggtcggcaaatcacctgagcccaggaggtcaaggctgcagtgagctgtgatcacaccactgcactccagcttgggtgacagaccctgtctcaaaaaagaaaatataagccattgttaatttcaggctcagaagtgtttgtcaccaaggttgcaagctagtcctcagtactattctgtatggagagacttcatgagaaaattagtatatatatattttttcctctcaaggtgtcataggtagacagctccttcagccacaccattctttccaagtcgcatgccgctcccctggttagtgttacctgacaggagacctgactcaccttacatgttcattcccttcttacctgaggaatttggggcactcccagtggcccttaggcagtgcttttcccctgtgagcatattgcctggagggctagggggttgggggaatgcaggaattaaaaagacccagtagaggctggtttatgcctgtaatcccagcactttgggaggctaagggaggaggatgactggaatccctctacgcaaaagtaaaaattagctcaggttgggcatggcggtccatgcatgtaattccaacagtgggaggctgcagcaggaggattgctgaaagccaggagttcgagaccaggtcaacaaagcgagaccctgttcctataaaagttttaaaattaactgggcctggccaggcacagtggctcacgcctgtaatcccaacactgggaagccaaggcagatggattgcttgacctcaggagttcgaggcgagtctgggcaacatggtgaaaccctgtctctacaaaaaactacaaaagaaaatagccaggcatggtggtacacacatgtaatcccagctactctggaggctaaggtgggaggatcacttgagcctgggaggcagaggttgcagtgagccaagatggcgtcactgcactccagcctgggtaacagagtgagaccctgtctcaaaaataagtaagttggccaggcgcggtggctcacgcctgtaatcccagcactttgggaggccgaagtgggcagatcacgaggtcaggagatcgagaccatcctagctaacacggtgaaaccccgtctctactaaaactacaaaaaaattaggcaggcgcctgtagtcccagctactctggaggctgaggcaggagaatggcatgaacccgggaggcggagcttgcagtgagctgagatcgcaccactgcactccagcctgggcgacagagctagactccgtctcaaaaaaataaattaaaaaaaaaaagtaagtaagtaaaaattagccaggcacagtggtatgtgcctgtagtcctggctacccaggagtttgaggctgcaatgagctatgattgcaccactgcacaccagcccaggtgacagcaagaccctgtctccaaaaaaggaaaagaaatgccctaatagatgttcattacttagagtagactggcagctgccccttggtgatttattgatggatgctggtgtgcataagcgttgccttggagagggcagctgtggtacccaagctgccagccggcctgacctccctgtgtgcactcacagccagcattcctcagagggccctgcctgtgggagcagacaccccttgccctggggcccagacctcagcagggccccagtagccagggagtgcctaaatcctggggactgaacaaaagtgtgcctctgcagctcactgggataaaaaggactgggaggcctggcacagtggctcatgcctgtaatcccagcactttgggaggccgaggtaggcagatcacctgaggtcaggagtttgagaacagcctgaccaacatggtgaaaccccgtctctactaaaaatacaaaattagccgggcgtggtggcgggcgcctgtattcccagctacttgggagggtgaggcaggagaatcgcttgaacccgggaggcagaagttgcagtgacccgagatcgcgccattgcactccagcctgggcaacaagagcgaaactgcctcaaaaaaataataataaaaaggactgggatgcctctaccacccatgaacttgggcacattagcaaaaggcaccccttctgggtggggacaactcccagttacccacttggcaggtgcccttatgcaggatacaacctgcacaattggccatggctgctctgcaagggaagaggaaatgacctttttcccctcctctgggagccacatctcatcctgcctcactgggctgctttcactatcagagggtcattcatactccgaacagctaggaggtggctctggagaaaaactgcctgagttcactccccagcccagccgcctcagggtatgtgagttgtcttctctgtacctgttttacagctggggaaagtagtaattgtacccacgtcagtagttaatgcctgcaaagagtttagaacagcttggtgggtgcagtggctcacgcctgtaatctcagcactttggaggccaaggcgcgtggatcatctgaggccaggagttcgagaccagcctggccaacgtggtgaaaccccacctctactaaaaatacaaaaattagctgggcttggtggcgggtgcctgtaatcccagctactcaggaggctgaggcaggagaatagcttgaaccagggaggtggaggttgcagtgagctgagatcacgccattgcacttcagcctggacgacagagtgagaccttgtctcaaaaaaataagctgggcgtggtgtctcactcctataatcccagcactttgggaggctgaagtgggcggatcatgaggtcaggagttcaagaccagcctgtccaatatagtgaaaccccatctctactaaaaaacacaaaaattagctgtgtgtggtggcgcatgcctgtagtctcagctattcgggaggctgagacaagagaatcgcttgaacccgggaggcagaggttgcagtgagccaagatcatgccattgcactccagcctgggcaacagagtgagactccgtctcaaaaactaataataaataaataaataataaattaaaaaatagccggggcgcagtggctcatgcccgtaatcccagcactttgggaggccgaggcggatggatcaactgaggtcaggagttcaagatcagcctaaccaacatggagaaaccccgtctctactaaaaatacaaaattaaccaggcgtggtggcgcacgcctgtaatcccagctactcgggaggctgaggcaggagaatcacttgagcctgggaggtggaggttggggtgagccgagatcgcgccattgcactccagcctgggcaacaagagcgaaactctgtcttaaaaaaaaaaaaaatagccaggcctggtggcgcgtgcctgtaatcccagctactcaggacacttgaggtgggagaattgcttgaacccgggaggtggaggttgcagtgagccaagattgtgccactgcactccagcctgggtgacagagcgagactccatctcaaaataaataaataaataaataaaaataaaagaaactcaaattggttctgtctccaaattccatcctggtgggtgcttgtcatgctcacttggggttcagggctgctgctccagctgcttcctgagacatctctagacattgcagtatttgttcatgtccccgccctgtgaggacacaccctctctagttgccttccctgaagtagtgttaacaatgggatacagcatttaataaattctgactgaggtctcacgggttcaatggtaaacctaaaaacgcctgtagggcccactggccataccccttctctcagagcccctcctggtcccttggacatcaatagacacatcagctattattactacactgcccatagatggctgccaggaagtagcctcaaggctgacaattaaagggaggctttaatttaaacttcaatggctggggctgtcgcctccatctgggagcacttggtctggacggtttctcagagtccaccaggagctgcagcgaggggcagatggcccatcccctgaggagtttttcccccaggccagaccatgcataagagtcctgagctagttcttcaagtcaggctggaggagaccgccctgccctgccccactccagcccagctctggaaacagccaacacgcctgggggtctttggccaggtcctggcatctcctaggacatcgggctgctgcctgggcctcgtccccttcctctgctgtcactggatccatcccttcgcgttcctttggcagaggcagagaagcagagaaggatccttgcaactcccatagctggagaaaccataaaccatggtggttggttttttttttttttttttttttttttgagacagagtctccctctgttgcccaggctggagtgcagtggtgcgatctcagctcaccgcaacttctgccccctgggttcaagtgattctcctgcctcagcctcctgagtagctgggactacaggcgcgtgacaccacacccagctaattttttgtatttttagtagaaacggggttttaccatgttagccaggatggtctcgatctcctgaccttgtgatccgcctgcctcggcctccggaagtgctgagattacaggcgtgagccaccgcacctggcaatattttattttatttatatttttgagacaggttctcactttgtcacccaggctgaagtgcagtggtgcgatctcagctcactgcaacctcgacctcctgggctcaagtgatcctcctgcctcagccctccaggtagctgggaccactggcatgcaacaccacacttggctaatcttttgtattttttgtagagacagggtttcaccatgtttgccaggctggccttgaacatcccatgcccgatgggatgatattttaaatcaggtgatccgggaaagtctcactgaggatgtggtatttccacagagacctataggaaatggggctgtgagccctagggactcagtgtctggggaaagtgttcctgggagtcgtgactccacctcacaagtacaaaggcctcatcagaggctgagtttggcacctggtgtgcttgagggacagcaaggtggggggtactcgaaggctttttttttttttgagacagtcttgctctgtcacccaggctggagtgcagtgccgtgatctcagctcattgtaacctccacctcccaggttcaagcaattctcctgcctcagccacccgagtagttgggattataggcgtgcacctccacacccggctaatttttgtatttttagtaaagacgggatttcattatgtcgtccaggctgttctcaaactcctggtgtcaagtgatctgcccgcctcagcctcccaaagtgctgggattacaggtgtgagccaccatgctagctgactctaaactgtttcataaactaggttgaggcagggcttgggtggctcacacataatcccagcctgtaatcccagcattccctgaggtaggaggatcacttgaggccaggagttccaggccagcctaagcaacctagcgagaccacccccacacactcccctcacccccaccacttgtctctacaaaaaatttagcaattgccgggcacagtggctcacgcctgtaatcccagcactttaggaggccgaggtgggcggatcacaaagtcaggagatcaagaccatcctggctaatacggtgaaaccccgtctctactaaatatacaaaaaattagctgggcatggtggcaggtgcctgtagtcccagctacttgggaggctgaggcatgagaatggcgtgaaccagggaggcggagcttgcagtgagccaagaccgtgccactgcactccagcctgggcgacagagtgagactccgtctcaaaaaaaaatagaaattagccaggcgtggtggggtgcacctgcagtcccagctacttgggaggctaaagcaggaggatcatttgggcccaggaatttgaggctgcagtgaactggaacggtgtcactgtacttcagcctggtgacatagcgagttgctgtgtcaaacaccatcaccaccaccagcaccaagaacaatatcaacaaaacttggctgagctggatgtggtggtacgtgttcacagtcgcagctactcagaaggctgaggtaggagaatcaagagtctgagctcaacttgggcaaaatattgagaaccctgtctccaaaaacaaaaaactaaaacactgggctggccgggtagagtggctcatgcccgtaatccctgcactttgggaggctgaggcaggcagatcacctgagctcaggagttcaagaccagcctggccaacatggcaaaacccctctttactaaaaatataaaaattagccgggcatggtggcatatgcctgtaatcccagctactctggaggctgagacaggagaatcgcttgaactcgggatgcggaggttgcagtgagccgagatcatgccactacactctggtctgggtgacagggcgagactccacctccaataaaaaaaaaaaaaggaaaaaaacactgggctgggctgggctgggctgggcaaggcagggcagggcagactcctctgcagcctttcttcctttccttgactttgactgttaccctgagcgtggagccacaggaaggtttgaacagaggagggaggaatgtgatctgactcagtcattcattcacaggctccctccagcttctcctgggaaagagaagggggtgggagggggagctgggagacagtggggaactgctgcaatggcccaagggaaggcgaggcgagggtagacagaacctgggtggcgcagtggggcagggggaagtgggtgggttctgtgtattctttcaagatggaatgacagaatttcctgaagaactggatggggttgtgaagacaaagaggcattaaggatgaccgcaaggtctgtagcctcagcaactgcaaggctggaggtgcacgaattgaagagggatgactgtgggatgggatgaccaagcttggggggaagatcaggaactctattttggatatttattattattattatttgagatggagtttcgctcttgttgcccaagctggagtacaatggtgcaatcttggctcaccacaacctccgtctcccaggttcaagctattctcctacctcagcctcctgagtagctgggattacaggcatgtgccactatgcctggctaattttgtatttttagtagagacggagtcgttggcccggctggtcttgaactcctgacctggggtgatccgcccacttcggccccccaaagtgctgggattacaggcgtgagccaccacacctggccggatatttatttatttatttttatttttattttagacggagtcttgctctgtcgcccaggctggagtacagtggcgcgatctcggcttactgcagcctctgcctcccgagttccagtgattcccctacctcagccccctgggtagctgggattacaggtgcatgccaccaagcccggctaatttttgtatttttagtagagacggggtttcaccatgttggccaggctggcctctaactcctgacctcgtgatctgcctgcctcggcctcccaaagtgctgggattacaggcatgagccactgcgcccggccatttatttttaatgtaaacatttttttgtagagatgagatcttgttatgttacccagtctggcctcaaactcttgggctcaagcactcttccagccttgactccccagagtgctgggattgcaagagtaagccaccagtgcctggctgaatatttaaatttaagatgcttcctgatgcagtggctcgcacctttgtttaaatgtctgccttctccatgaagcctacctgagtagtttatttgcattccagcccatgcttgatttttctccaaatactcaacaccttggaatatacaatactacctattttttacttttatgtatatttttgagacaggatttcgcttctggagtgcattggtgtgatcacagctcactgcagactggaactcctgggctcaagtgatgtcccttcctcagcctcctgagtagctgggactacaggtgcacacagccatgcccagtgaatttttacatttcttgtagagacaggttcttgttatgttgcctaggctggccttgaactcttgggctcaagccatcctcccgcctcagcttcccaaagtgctgggattacaggtgtgagcccctgtgcctgtctacatattttttaaaattttgagtgttgaggccaggcgcagtggctcatgcctgtaagcccagcactttgggaggccgaggtgggcggatcacctgaggtcgggagtttgagaccagcctgaccaacatggagaaaccccgtctctactaaaaatacaaaattagccaggagtggtggcacatgcctgtgatcccagctactcgggaggctgaggcaggagaatagcttgaacctgggaggcggaggttgcagtgagcccagatcacgccattgcactccagcctgggcaacaagagcgaaactccgtctcaaaaaaaaaaatttgtgtgttggttgggcgcggtggctcacgcctgtaattccagcactttgggaggctgaggcgggaggatcgcttgagctcaagagttcaagaccagcctggccaacatggtgaaaccccgtctctactaaaaaaatacaaaaattagccgggtgtggtggagcatgcctgtgttcccagctactcgggaggctgaggcaggagaattgcttgaatccgggaggcggaggttgcagtgagccgagatcgcgccactgcactccagcctgggagacagagcgagactccgtctcaaaaaataataaaaataaaagtagatttgtgtgtatgtggcttcctttactagaaggtagtttcatgaaagttgggatttttttctgtttttagtgcctgcgtaaaacatagtctggcacagaataggtgttcaataaatatttgttgaatttgtgtcgctgaatgggaacccggtgcagtgcattccaagcctgagctggttcaggtccgatggcggggcctgcccttatgaatcattcatgatctggccccgcccatacgcgaacgacgcgcgcgttcacgccggagagggggcgcggctcgcccccgggctgagtcgggcggccaggaagcgggactctgcgcaggcgccaagctccggagcgcggccttggtgccttttctggtttggcaggcgcgcgcgcgcgggagggcggcaacctcggcgctgtgcgcaggcgcggcgggcagtgcgcaggcgcgggcggagggcgggctgaagcagctgaagcggcggtagcggcggcggctcgggcagaggggcgggagctgaggcgggagcggacaggctggtgggcgagcgagaggcggcggaatggtggactaccacgcggcgaaccagtcgtaccagtacggccccagcagcgcgggcaatggcgctggcggcgggggcagcatgggcgactacatggcccaggaggacgactgggaccgggacctgctgctggacccggcctgggagaagcagcagcgcaaggtgcgcggcccgcgggccggacgggctggaggggcttttctgagggggcccggggaggggtgggaggtcctgaaaggtaactggagcgtctgtgatgggaacgggggggtcccgagaaggaattggcgggtccgggaagggaattggagtcctgaggaggaatcgccgagctagaggaaggaattgggaatctgaaaagagaattggcggctgggtggggaatatgggagtcaaataaaaggaatcgggaaggctgatgaaggatttggagggtctgggcgtgccattaggggaaaccgaggagatgactgggcaggctgaaatggaactgggatccgaggcgggcttgaagggtcggagcatgggttgggggtgctgggaggagaatcaggggaggctgagaagggaatttctgggtctgggaagtgtgaggaggagcttgagtgtggaggggttggttatttggagagcagaaagatctgaaggagattggaattgggggagcctcaggttgggggagttataaaggggatgaagaatcaagtgtgaggatggagtggagattgtggggtctgaagacgggtgggaagactagggaggctgggaagatgaaaacaggggctaagggtagaattgagcatgaaaagacatgggcttagggtgtgaggagggtagaggtgccaggactgggggtctgaggagggtggggtgcggaaggaagaagttaaggggcccgtgaatcagacgtttttgaagggggtgagatttatttgtggtgccctgttccaaaggggagaagattaagagataggaggaataataagaggaattgatgagggatggagaagccgaagtagaggggatacggagagtggggataatttggggagggatttctaaagaattgatgggaagctgaaaagctaaagcgttggagagaatgaggaagtgtagagggagaaggtgagatcggtgggagggagggtgagctggaatggtggataatgggagagaggttcgtttaggaaaatgaaagtctcattagaaagggaatgcgtaatggatagactgagaaaggaatttgaggagggggtgctggctcctggaggtgcagtcccgggactggagagcgtgtgtgtgtcgtgcaggcagaatgagtttggggaggaagcgttgagagtgtccaggaagaattgtgtcttttttggagagaccggaggtaggtgaagggatcctgaagcagagactgtgttcaggtggcactgtttttttggggggcggggggggcaacttggtagggccccacagcagtgaaaaggtgatcagaagtggagtgggatccccgagcgaggtgtcagtgtctgtgggggggggataaatccagtgtggttgaggggggagctctgagtgtgtgcaggaagagctaaagaaaggagcgtggtgagtgggtgtgtgtggggggaaggggttgttcagaagttttgtgcgtgaaatgggtgggaggtacttgaagttggaagcatttcgtgggatctggagatctggattttctttccagatttgttactgattcgctctgtggccttggacaagacccttgaactctccgggcagttttgttatctgcaaaatgcaaagggatccgagggttccctgcggtgattctgttaataaagagggatgtgtgtagagttgggactttggacagggctctgaaggtttgggagagtgagtttggtggagatttttcaggaacaggctacagggctttgagtggtgacctggcagagtggggagtgactggaagcctctcgagggcgcgagttggtggccaggagcttggcacaggcagcctagcccaggctggaggggaaagggtgggaagggtggaaggagcagctgttccaaggcagcctgaggtggggccgggcataaccttgggtccattaccagcgttgcttgaatttcctcatccgtagtaactgaggggcatggcagtggcttggtgggaggggtgtccttatccgtggccccacctactgcaggatggacaggttgcgatagttggcataaattcactttttgaggggaaggtgagatctgttctggagtctcaacaataatttattgcctgaggcagtgccaggttggaaaaggttgccaagagacctggaaagttgggagggagcaggggccacagtggtggttttgagaatgtctaggctttgtcttctgcagctgaaggtgctggagaaaataaacccctcccccttttttctcaggtgataagggtggggggaccttccttttctctcccttcctgtcttctgccactcctcaagtgactccttttgcgagccgggtttcactccctcccgagagttagggtgtgggctttgttcgtggttatagtgtcccttgcctacagggtgaggctggggcaccattcaggccctgggtggaaaccaggactccccagaacctccaggccttgctgccatgtgtcattctcttacctcccagctcccttcctctggggccgggcaggtttgagggaaaagggtggctcacagagtccgctaataccatctgctttcgtgtctcagccagagccagattctagtacctcctgctttacacctcctccagcaaatatttacccttagctgctctgtgggggaaactactgcttcacctctgtgccctttcctgttatggggtagggattctttttgaaatgggggaaggagtaatggaaaggaatacaccaatctgtgtggctctctaccttcctactaagaaacatccctgcactcccaggctggctgggttgtttgtttgtttgtttgtttgtttttggagacggagttttgctcttgttgcccgggcgtgatcttggctcaccgcaacctccgtctcccgggttcaagcgattctcctgcctcagcctcccgagtagctgggaatacgggcatgcgccaccacgcctggctttttgtatttttagtagagacggggtttctccatgttggtcgggctggtctcaaactcccgaccccaggagatccgcccgcctcggtctcccaaagtgctgggattacaggagtgagccactgcacccagactggctgggttttttctacattgcagtgttgctttagtgaatgacagattgcccttcttgcctctccaaggctgagccactgggcacgggaagaatgacagtcctgggggttctgtacatgcatactccaaaaaaatatgcatccagaacagctgtaggccctcaaagtgggtagaattgaattcttctaggaattaagcaagagttggcccaaatcagaggggacgtgtgtctcacttctgcttggaagccctttgctctgacttctagggacccctgtaacccgtaagtaggttatgcaacggtttttacatgagagggccatgagtgttctcctggcgggatggagaagcattgttctggtctttgagcaaattcttgagcaattacagttctgggccacagttccctctcccaatttctaaaagtggcctgggtaacctcatcaccctctgttgtcctggaagggtgagatctcttgaaggttatgccaaatctcattacagcaagaagaaatgactcacttgctaagttttcgtgttcattgaaacatcactatttcaggggcctcaatgtttcaaccctgaccgttggctttttttttggagacggagttttgctcttgttgcccatgtggctgtattaggtatgagttaactatttgaaagtttttgtttgttttttgtatttgttttttttgttttgttttgttttgttttttttgagacagagcctcactctgtcaccaggctggagtgcagtggtgtgatcttggctcaccacaacctcttccaggttcaaggaattctcctgcctcagcctcctgagtagctgggactacaggcgtgtgctaccgtgcctggctaatttttgtgtttttagtagagacagagagtttcaccatgttggccaggctggtctgaaactcctgaccccaagtgatccgcctgcctcggcctcccaaagtgctgggattacaggcgtgagccactgtgccctgccttgtttttcttgaagtagatctttttttctttttaaaggctgataatggaggccccaaagtagccatctgttactttgttccattactctaattgcttgcctcttaggatctggctaggactaacagttttcaaaattgagtaacacacttgacaaaaaaaaaggaaccaaactcaaactcaactgttatctagaaaaaagactgtgtaaatatgtgtgagaggcaagtatactctgtttgccctcttgtaagagggataggggaggccactcagctgctagcactctgttctctcccctcatcctctccagaatgtattttagaacttgactcttctaatgactgaagaaaaggtggggtatgggaagatggcctgggactgcagggtcacttacactcacctggctaagagttgagatctggctggtgccctggagtggcacctgccactcacctaatcctaaacaatccagggtgtgggcccaggattgccctctgccttttgaaacaccctccctggttccggcttctaagaccaacagggaggctactttggtggcagggagctgactcaccctccagttggaactggtgctaaaagcctccatttaacggcagccgactgcttggccccaagtgggctgccttgtgggggggaaagttcagtggaaagtgttggaggaagcagggtggtgtgtgaatatccaagtagtgctggtgctattaagctctgacacagtcagggaggtcagttaaaatgtggtcttatggccgggcgcagtggctcgcgcctgtaatcccagcactttgggaggctgaggtgggcagatcacctgaggtcaggagttcgagaccagcctggccaacatggtgaaaccccgtctctaccaataatacaaaaattaactgggcatggtggcaggtgcctgtaatcccagctacttgggaggctgaggcaggagaatcgcttgaacctgagaggtggaggttgcagtgagccaagatcgcgctactgcactccagcctgagtgacagaacaagactccatctcaaaaaaaaaaaaaaaaatcagatgacagaggggagcggggacaagttttaagtctaagcctcctgggtggggagttctgctgtttcaacatatgctccagtcatggcagactttggccagacagcgccctttttcagagtgaactgagtgtagcacaagttatctgccagtgctagttagcaaacagaatggagccaaaaaagaattgatttgggaaggcccaaggaatttgaaaccgttgagatgaacactttccgtttttgctacactgatttatgttgtgctgggaattgtacaagcctttgaccagaccttagggttgttctttaaaaaaaaaaaaaaaagattcccttgctgctgcttttacttttttgaagggcagaagggaagggcaaatataattagtgaacagctgtttgctctagtatcacttgctcgttcaggttttctgaatagctgaaatatcaacatgtttatctcttcccttgccttagtatatcctagagcagtgttttccccggctttatctttattccttcatttaatgaactccgtgttttcatcactcacattttgttcccttccctcagtttccttcctttgccttcatttatgtatttagtttacagaataacaaaagcactcgtgttacttttaaacaaggtaaaacttaaacagttttttcctccgtttctttttttatggaaataagaggcaagtgatagcaagtgggtaattcaatggcagtggtaactgaagcactgacctgttacaagagagacggaagcttctacttgagcagatacaaatactgtcatccgtggagatttgaaagaagtctttctatcactgggtagtttgagagctcattagtcttctttagaatgggtttaaacttggaaacatcaaagcaagttacaaggaaacttagttttacagtgttggcagcctaggcgccagaatttgttataaagtgtctgaaagtggcccaggtatcacttaacttttcttcaagaaggtctatgagttacattttactcggtatcccaggcatcaaggagtgtaactttcaatgaatcaaagagaaacagaatcattttaaattccagcctctgtttaaagaaggatcttatgaaggggagaaattaaccacctgacccagggaaggatcccgcctcctccagaaagtgaaatcgccgggtgtggtggctcacgcctgtaatcccagcactttgggaggtcgaggtaggtggatcacgtgaggtcaggacttcaagaccagcctggcgaacatggtgaaaccccatctctactaaaatgcaaaaaattagccgggcacggtggtgcacccctgtaatcccagctactggggaggctgaggcaggataatcactcaaacctggaaggtggaggttgcagtcagctgagatcacgccactgcactccagcctggacgacagagtaaggctccgtctcaaaaaaaaaaaaaaaagaaaaagaaaaggagttaaatctttgcatatatttaactggcaagagcatccttacatcagtgcatgggaagttttatccaagtagcagtttccctgggattataaaaatccccgaggcatttgtcttggtgttgtgcctttttttggttgtgttttttcacgtccctcccctcccctttctccataaacaagagaggcattaacttggaatgtccgtggaaagtcttagaagctgattggtgtaatttgcctgccttccctttagtttgaacagcgtttactctggaagaggtcagtggcctttttcttggttgtgatttatgcaagtgttatctgaaggcgagtggagtgagtttacgtgggatttgctgtttgccacctgttgttgtgctggctccttccttcctgggatgagttccattctctccccctcccccaggagtgaggctccccagccagagcagtccccctgtgcttatccccttccttcgtaaactgcagccatttgtgattttccataaccacttttatagacacataataatttcctttgaatcagtttgcattttaaattaagttttgaaaggaaaactgacaagagtatggcaactggaaaacccagctcccctggccataaatataatagaaggaaactgcaaaaataaacacattgaaaacaaaacagtgttgtttccaggtggttaccactcgggctgaaggccccccaggcttgaggcctgctccctttgttagaaagggattggcaagtgttggtgaggtgttaaagacccaccagcaccaagcagagactttctctttgaagtcatcaggtttacaagagaatcaaaggaaataactttctcaatgtgattcagggtgtaatgtaaggtgtagataacccttaaaattttccatgtgtgtatgtcacacttgggaaaaaaacttgatctcatctggtcgaggtgggcagggcagcaccttgtccaggagcacacagcccctcttggctctgtgtgtcatccggccatactagactcgaacatatggctcatgactggatgatgcttgattcatcttcagtttcaagtgttagtgcttttgaggttttgtaagaaaccaggacacattgaaaatacagtcatttctcagtatctgtgggggattggttccaggaacccccttatataccaaaatccacagatgctcaagttccttatgtaagataaaacgatgtgtaatttgcattttaactatgcacatcctcctgaatactttaaatcatctctagattacttataacctaatgctaaatgctacgtaaatggttgttacactgtgctgtttaggaaataatgacaaaaatatgtacatgttcagtgcagatgcaaccattcattttttttcttccagtattttcgatccattgttggttgaattcacagatagagaacccatggatacagagggctagctgtaagaaatgtgggtttatcatttgttcctcacacaacttttttctttcttcgtttttcttgcctttgttccttttttttgagacagggtgtcactctttttaccaaggctggagtgcagtggaacaatcttggctcactgaagctttgacctcgggctcaagccatccccccacctcagcttcccaagtagctgggactagaggtgcacaccaccacgcctgactgatttttgtgtttttgtagagatggggttttgctgtgttgcccagtctggtctcagcctcccaaagtcttgggattacaggtgtgagtcaccacgcccagccaactttttctcttaaggctccagttttcttcttagagttgggcccctcccacgaagaaagcacactgccaccccttcatcggatttgaaccctacattttgaaaggaaagcagtgccctcctgctgagttaacaaggcttatttaaatgtttttcttccaaatatcagagcagaacagattctttgtcttccagtggaactatccacatggggcagaagtagttggaagcggcagttactaccctgcagaacacaatgaagtcatcttgggaaatatcgtggatggtgttgcaatgattgaatgggatgctagaacaccagcaatacaatagcatttgtgtcttcagcttcaggcaggaataaagaagactttgtggtttgttttatgttttttaaagtttcccccccaaaggtgtggggctgagtgatgtctgtcactagctttctagtgggtttttcttttcatcttttcccctccctgatgtcttttgagagtgggtggaagccacagtctaggtggatcagaggaagcacagaaggcaggcagtataccccactttgtgttttccatgtctgaagggaacacatttggtttttgttctgttttgattttttagagacagggtttcactgtcacccaggctggagtgcagtggcctaatcataactcactgcagccttgaactcttgggctcaagggatctttcagcctcagcctccctagtagctgggattatgtgtgcaccaccatggccagctaattttaattttttttttttttgagatggagtctcactctgtcacccaggctggagtgcagtagcacgatctcagctcactgcaacctctgcctccccggttcaagtgattctcctgcctcagcttcccaagtagctgggattacaggcgcgcgccacgacgcccagctaatttttgtatttttagtagagacagggtttcaccatgttggccaggctggtcttgagctcctgaccttaagcgatccacccaccttggcccaacaaagtgctggggttacaggcatgagccactgtgcccgaactaatttttaaattttttgtaaagactgggtctcactatgttgcccaggcttttaatctgcaaaaagcccaagataaagagttttaatatcttacctcctgagtagtaatgactgattccagttctaataatgtcttaattacagctatacagattgaggggactgcaggaagtgaaatagatgcatttcttttttctttctttcttttccttttttaaatacacacttcgtttcggtggtgaaggccagtttgaggttaggagaggcatcttggaaggaagctcgcaggtggttcggcatctggacatgctgggaagttgcctgagggggacgtcacaataagaggactgtgggtctacagcctgccttagcaaaatgacaggccttcttttaccaaggccaagggcagtggtggaagctgacttcagttggtgtcatcaaggcctcagtatgtgtaacggttaacaaattactattctatgatcaatctccatctgggtgtgagtaaaaggtatttagttgctatcaccatggaaaccaagttgcttacttactgttttggggagtgccctcataccagaggcagtgctaatggtggagtgttaggccccgggcagaaaaaaagatcctgccacttggtatcacaggaaaatacctacaggcacagcagccttgccaggtaggggatgaaggccctctgtcctcggggcaggagttgggccagttgattgtgttgatgaggagtgtgcatttgtgcatgagagagggagaagaaaaaggagagcactccatgaaatccgctgctggctttgtagcctagaagagtgctttttttctctaggagtttggaactggaatctcagctatgtgacttcttaataataggacaaaatatgcctgtatcttttgcctacttccacaaacactgataaattaaaaagaactctaaatttcccacaaatcccaagcacaagtaactttttttttaaatccacatcctccctaatccaaatctaacagcaaatccttttctctctgtcactccctgcttttctttaagaaaatgagtaccttgccttaaactatatattggatgaaaatattaaacactttcacaaagtgcttctttggctgttactggtatgccttgcatttggaagggtcagagatttgaagacttctgtgatcttccagttctggcctatgaaatacagtcagtttcaaaattcaaaatgtctggaagagccaacttgccaggccggttcaagggcagtcagatgaatcgacccttcttacaggctgtctacgaaccagtcatgattcagatattcaagtcctggaaggtatccagacggtaaacatcaccaggattgtgaggcagttacttttttttttggatcgtttgagctacactgccaagactgtggtaggacttgtctgtgtaaaacagaaagggctgtctctaaatgtctttttcaagaatgtcggctataatcacccgacactgtgtctcatggtggggtgagatgaaatacctagaccggttaggggagggccttcttggccattttttgaactaattttccctttccctttgtaacttttttttcttcttttcttttctttttttttttttgagacggagtcttactctgtcacccaggctggagtgtagtggtgcaatctcggctcattgcaacctccgcatcctgggttcaagtgattctcctgccttaggctcccgagtagctgggactacaggcatgcattccacgcccagctagttttggtattttttaggagagacggagtttcaccatgttggccaggctggtcttgaacccttgacctcgtaatgcccacctaggcctcccaaagtgctgggattacaggtatgagccaccgcgcccagcccctttgtaactttcattaacactgatgaggcacaagccataggatagaattgaatccattgagagctgtgagccaattgagggatgattggttaatagattgtggcttgaagctgtggaaggtaaggggtgacacttgactcctattagccttgtagaaacacctcagagattcacaggaagcaaactttgaccataaaaatataagactcacagcgcaccgagttctcttagcagctaccttagagttgagaaagttttgggcctctttaataaacaagcacaaagcagttcttgccaaatacggcctgctctggggccacagggttagcttaggagacaactttcttgcctaaaaataaatgcatgttcctatcagacattccaagcatagtttaaacatgagacttctgagcagcagctcaagctctgtgggttcaattatgtcagagtatgggcagtgagggtctttggggagtgtgcccccttatttgggattggttgtggctaccaaggaaatcagatgatcaaatgcaaaacttcctccatcttatttctatatgatcttttttttttttttttgagttggagtcttgctctgttgcccaggctggagtgcagtggcaggatctcagctcactgcagcctctgtctcccagattcaagctattattctcctgcctcagccttccaaatagctgggactacaggcgtggccatcatgtccggctaatttttgtatttttagtagagacagggttttgccatgttggccaggctggtctccaactcctgacctcaggtcatccacccgctttggcctcccagagtgctgggattacaggcatgggccaccgcccccagccttatttctacacgttcttgatctatcacaggctggtgggggagacagcatgcatatagataatgaacaaggtaacttcagataggattatgtgcaataaattaaataacagctagcattttaccttgtgctagacactattctaagtgcttcccatggactgactggtttttgtttttttttctttcctttgagactgagtttcgctcttgttgcccaggctggagtgcaatggcgtgttcttggctcactgcaacctccgtctcctgggttcaagcaattctcctgcctcagcctcccgagtagctgggattacaggcacgtgccaccatgcctggctaatttttgtatttttagtagagacggggtttctccttgttggtcaggctggccttgaactcccaacctcaggtgacccacccgcctcagccaccccaagtgctgggattacaggcgcgagccaccatgcccgacccatggactcacttgtataatcttgtgaagcaggtgttgttacccttacatgcagaaatggatccatgggcctttaagccacttgcccctgtgacagtgccaggatttgaatgtagaagttgaggctttcaagtttatgctgttatttctacactacactgaagtctagtgattgggaatggctttgcgagcgggtggtgaggggaggagtgtgcagtgcaggtacttcagatggagaggaaggtctcaaagaggtggcatttcagctgttccttaacggatgagaaagagagaaccaagagagcaccagaggaacgcgcttccaacagagaaaaccaagcaagggggcccccgaggagcagaaaggcccgagtggtcagagcggagcccgtggaagagatgggcacagccagattgcttagagctgtgttgttagaagtgctgatgagtctacattcaacttgcgcctgcaaactcagtccctcttagatgccagtaggtcaggaacctcatgcttccaggactctggcgctcctaccctttcctcccaggcctcctggacaggccaaaccagaactgacttctaaagtgggaaccccaagacggcagaacatgaatcagccaaacaaaagctgcagttatctctgtgatgatttcggcagtcggcacgtgtatttgattaaagcgttggtaactttgaatctggagttttatggcactgtgtactactcataatggctttgtagtgtggctctcttagggagcttaacttttacaacatgaacaagttccagcctcctttggtcccatcaagaggccatttctacctggtgggatgccacttgctttacaaagcatcttttgtaaaatgttgagtctccttctttgaagttggaagccaggaagcctgattttttttccaataagtattgtagaagatggcagcctgatttatttttatttatttatttattttgagacggagtctcactctgttgcccaggctggagtgcagtggcacaatctcggctcactgcaagctccacctcccaggttcacgccattctcctgcctcagcctcccgagtagctgggactacaggcgcccgccaccatgcccggctaattttttgtattttttgtagagacggggtttcaccgtgttaaccaggatggtcttgatctcctgacctcgttatccgcccgcctcggcttcccaaagtgctgggattacaggcgtgagccaccgcgcccggcctggcagcctgatttttaaactggcttttctcctaggtcctttccttctctataaatccctctttcacttagtatttcctccttgtttcctttggtcagttggagtgagggtggttctagttcagagaaagagacaggcatacaggctgattcagtctgaggtgcttagctttctgtacctcactggaaaccagtccaggaatatgacaggtttcagtaggtttcattggacccacaactccccatttgaaggcagagcttgtcaaacgagttatgtggcttttactcaaggagggaggaacagcaacagggagctctgggctattgatagacactcctgcctctgaacacacagcacccagcaagaagttaccttcatgggttgtctagagtgaacatgggctgggattctctcagccttagcactgatgatttgacaacaaaaatcgccccgtgggtagagtataacggagcaaatgattatggtggcctgtgatggtgcagccagcccagctgcttcagctggaaagaagatggcgaggtttccattctcctggcagcatagccatgtgaacttgttaaatcttttaagtagctgtataggaggggagataagtgtgtgtgtgtttattcttatccccttaaatacaaaaacaaaacttccactttataaaatcaattcagagtgggaagaggtgcatggcacatggaaaatgtgtcggattaggttgagtcctaccccacgtttgggacacagctgtaagtttccatggtgggtggcttattatgcatttatgctgagctgaacctgctccaagctgctgcagataggaaagtctgtcttggagggggagctgcctctttctatcacactataaagacataaaaggtcctttgaaagactccagcagtcaccacttgggtaacagaattaggggctgctgagcaaagtgggtctgtttttttttttttttaaagacagagtttccctcttgttgttcaggagtggagtgcaatgtcacaatcttggctcactgcaacttccgcctcctgggttcaagtgattcttctgcttcagcctcccaagtagctgggattacaggtgccggccaccacgcctagctagttttttgtatttttagtagagacggggtttcatcatgttggccgggctggttgtgaactgctgacctcaggtgatccacccgcctcagcctcccaaagtgctgggattacgggtgtgagccactgcgcccggccacattttatagccaaccggcttcttgtgtaacatgagttggggcttcttgggccccagagtccagcactcaggtagaaatatgaccgccatggccagacagcagccctcgctgggcccctcttcagagcagagctctgtgccgagcctttaggggtatgagagaaaccggagacctggtccgtgctctcaaagagctcgcggtgtagctggggagagagcaaggccacatgagacctcagaaggacactaaacggcacaccgacaagctcacagcactctagctgtgtcccgggagaggaaaggggtgaatcagggcaggtggggtcagtcatggaaactttcataaaggaggtgagtgtgcaggaggggcgggcctttgcccccgctgcgggcaggttgccgagggcaagtattagggggtccggcgtgcaatcgaacatttcttagctgcctctttggagtagcgctaccagttcctgtccccatgagcatcgtcttcggggagctgctggtttgaaggatgaggtaccatgctcatcttggccatgtcttagaacctgtgatagccagacctgtcgttctgggtccgtatccattcatgcgtcctgtcactgtcacagatatcgtgagtgggccagactcttctccccaggtgggagggggtgccttctgaggcatatgttttcagcctgctgatggcctcttcagaattagcacaggtttcgacaaaaagaatggagagactcccttctcatgtccaagggtctccccaagccctgtgtctcagcccctcagggcgtgtggtgctgcacactgccgcccagatgaccacgcgcagccggaacggccgccctgtattgagaagtgggatcggctcccagtctgctggcgaggctgggttgccacagctcctctgttgccctgcaacgcgggtggcctaggagtgtgctgccttcagtttattcctgcctgccaagctacgcttccaggtgctattcttttctttaaataactgccttagtgctgcttgtggaacttagcgttcccatcccaggaaatactccagtgttgtgtttttttttttaaactcattcagatgctcatggccaaatgtgtgacttaaataccgcagtgtccttgatattgccttccccacaccgacaaaccgagttgcattctggtcccactgtgggataaggttagggtagcggcgcttgcctctttgtgtggtttcagatgtgtttctccccacttcagataacacatgacagctgtaatatagctcagttcgtgcaagtaaggtaggggcagaaatcatccaggagaactccagcctccatcctaaaggattagactgcctagcatcagtaggtttaccatagaaggattcagtggagatagcgagggtggtgagtgttgctggattgagcccgtccctgcagcctgggcacgggagcactgcagtgccatgaaggagagggctgggggatattagcacagccggttcctatttccttttccacctggttaagacttccggggaggccctgcccagcagtccttatgagatgctgccttcctcttttttgaaaggcatagatgataaggaggtggacatgttttgagaagagaacctagagctcattacttgtatttgaggcatgtattgcttcactcccactttgggagagttttttctggggaagttaaaggctattcaggatcagagagtttcctgcatggtcccaggggctgggaggagccacctgctcagctggtggttagctgatagcacccagcctacccaccaagataggaggcagctcagatgtcactgggattcgcagtaccacaggctgtccctgggcccaagcagttagctagctgcaccccgggagggggtgttgagagcactgaagctcctgtgggagagtgcctttgacatcccccactccccactgcccagaactaggaggtagtgaaaggtgtcagtggcaagaaggctgggccagagcatggagggaggccgacctgggctccacacccacctcctccaccaccggctggctgtgcgaccctgggcaggtggcgggggttaagcctcagtgtccttctttgaaaaggggcatcatcctatcctcagtttgaggattagacgtgatagtgcgcaggaagcactctggtgcctggtacattgtaagtgctcaataaatgcagcttcccaaaatgatttcaatggcacatggtcctgcatccaggtgggatctgctacttgagtctccccctcaaaggggcctgctgaaatacgcagctcagtgggaaaccaaaacatacacccctttcctccagtgctccccaggaagcgccaagtcctgagcccagccagcaacttcgaagaagtgccctccaacaagtggcagtgggcacttgagcaagtgacttaacgcagccctctccccagcccctgcatccatctgggcctcattatctgggaggtggcttcttgtttcagagttacaggccctgaacaattttgtgttgggatgtgccataggcagtgccaggaaggttctttcatgagtaatttaacttgttactaagtttgctatcagccggggggctctttccccgggttcccttctttccctgggtccccttccccgcaaagcaaagtccaactcaagttagaaacatcccacagcctggagtcaggctgccctctcttcagttggtgtgtgatgtagaagcaggaagggcttcccactgataaccctaaaaataactgcccagaaatgctgtcagatggggccaagaggtgcacaggagcctgtgcccagctgccgacctggaacgtgggactttctagagggcttggaggagccctgccccttccaggcctcttcccaacagtgcttctcacgcctgctgctccattcccttttcctccttcctcccgcgcccccccctttcctggggtcacttcctgatgccattcttcaacttcgcccctgtcccccccaaaagcaatcaaatccacaacctaataaggcaaaagaatgaggagaatgtccgcctcccagcctctcccctaacagggtgcaggcctgaagcaaatttggaaaatgttacaacggagtgacaaccgatgggggctgggggtggggcggtgcagccttgttcaggagctgcccattgttggcctgaggcaggaccctaagggaaggccacccggtttgcgctttcctgatcaggctgttgacacccttctagcacaagaaaatgtatggaaagtaactgcctgagtcagctgcatctccagttgtgggatccacgtgccaggagaacacgaagtacacacaggtccgcagtgggagcccgctcggagacacctccccgccatcacggctgggactgtgcatatccaaacacttcttgcctctgagatgagcagttttcttccccttgactgtgccagggttcaattagcctgggcattaattaaaacttgtcaacacttagagtggggcccccagaaatctgtcacccctcctagatcattatcccaggctaatcaaccctctctaaggcagtttccattcttgacttagtgggagggaggaacaagcccctcggtgctggggagctctgggggaggtagggactgactgggcccaacccactttgttttggaaggtcaagcttagtaattaacctgaatgcttgggggagggggtgaaggagaaagaactgagtctagggatgtgccaggtctttcaaattgctaattatcagcgagcatgaggtcatccgtaaatatatctaattctttagcttgtaattaaggtgctcattaaaagtgcagggaagtcttgttttcctaaaaggggaaaaaaacaacaacacaaaaagtctttgttttgacctgacacgatggctcagaacagggggaggactcaaggcacaggactagtttcctgccttaaagagcctttacaggaaattgactgcaaacagtattggtgaccctgccaaggaggcaaacctagggtgatgtcattgttcgaagctgtcaccgccaagcctctggccttggggcgaggagagttggtgggattaaaaaatgagtgtgtgtatgtgtgtgtgtgtttagcagtctctaaagaggcgagtcaagggaaaatcctagcgggagaaaaatcacaaggggtggggggtgtctcagaaatattcttagctgggttcaactttcctcgtttttctaagtttaaaaaatcctctcttactatttttgctcatcaaaatgctgctgctttttcagagacagccttttttgagccattccctatttagtgttttgggtaattggctgttacagtatggaatttgtggcccaaaggcagcgtggtaagttagacactaggtgcacggtgccccattgttatgaagtgtggaaactgagacgctggactagtctgatgtatctgtttcttccaccaaaaaaaaaaaaaaaccattttggagaactacccaatgccagtgacttggcatctctgagtcgctaatcttcccatgtgcctccaggaaccgtctggagcgtccctgaaaaaaggacaaggtttgtatcttgtcatttttcctctggctggaagtctaagaggtataaacacagtcttaaaatgaaagcaacaaaaataaactcaaagcagccctgcgtgaaggcattaatgcaaaatatgcaagctggcttcctatttatacggcggaaggcagtcagaagagccaggcctggttaaggaaggagttatgtctctggaggtgcctgttccttagaattacaaataaaccctgggtgattactcagatgaggttgtaatgtggtgtctcatttcatgctttgcacagtccagtttcttgatggaaccaacggcctctgaaatgctaatgcaggatcaggatacagttagagtgccccccttcctgtgcccctcctaacatcctaacagctttagaaggaagtttgaagattaaacaggagagccatgtaagtttcctgtgatcctagatcctgtgatttgttaatattctttctcttcaatccacctgacatttacccagataccatattaggcttggagatacaacaagaaagaaaaccaacccaaccctgtccttaaagaaaagatggacgatgaagggccaggcgcagtggctcactcctgtaatcccagcactttgggaggccaaggcgcacagatcacgaggtcgggagtttgagaccatcctggccaacatggtgataccccgtctctactaaaatacaaaacattagctgggcatggtggtgcgcgcctgtagtcccagctactcaggaggctgaggcaggggaattgcttgaacctgagaggcggaggttgcagtgagccgaggtcgtgccactgcactccagcctggcaagagagtgagactccatcgcaaaaaaagaaaaaagaaaaaaagaaaagatggacaatgaattgcatgatggaagtgaacagtgttagggcgatatgcagatgtaaatgtggtcttgttttactgctcactgacttactgaagtaaacccattgacttcgccttcatgggtttgaaaagggtttttccaatgtgctctgtgtgtctcggagctcaggtgttcagagctgcctcccttataaatcgacctccaggagagttgtgtgtttggttcttggtgtatggtttcgtaggctccccagggctgaggagtcaccttgggatccagctttttttcttttttcgagacagtctctccctgtcgcccaggctgaaatgcagtggtatgcacttggctcactgcaacctctgtctcctgggttcaagcgattctcctacctcagcctcccaactagctgggattacagacgcctgccaccgtgcccagctaatttttgtatttttagtagagacggggtttcaccatgttggccagattggtctcgaattcctgacctcaggtgatccactgccttggcctcccaaagtgctgggattacaggcgtgagtcaccgcgcccagccaaaatccagctttttcttagttcctggcttggggcatgttgctggaaaggaatgacagattgaggcaagaaggaggcaagaaggatgcatctcctggccaaggaaactagagtttggaggtgtcccctgtcaatggcatctgaagaatttctacattggaaaggcataggtgacccagtctggtttggagtagatgggactgggtaggggactagtcttgaagctgcaagcatgctgtttttacttagagcacaggtagctggggaggagatcactgtggtgtgggtggcagaagccatccctagccatcacctaggaagatggtggcccttgggttgcccgagctgctgcttgttttagtagctgcatttggtgccacatttttgtggtaactgccaggaagcggagcccagcgtggcctcaggaagttggtgaggtttgcaccactttttaacaggctggtaacagtgccggagctgacaccctcatggttgcagccctgggattttgttatttggggacactttggaatatgtcactcagaatgctggctcactagctccacaagcaaaagactccttgggtagctggaagcaagcgttgggggaaggagggagaggcaattgcagtccagccaagaatctcaaggctcagtcttcaatgtatggaaacttcagtccttttctgatctttagtggaaatagctgttcactcttagcgccaattggaaagtgttggcagctgaagggggtcgttcctcaggggtccccagagccagtgtatctggtatttctaacattttcctagccacccctttctcctccatatgcccctcccagccccaccattcagatagggtggctggaaagaacatctcctaggtcctctaggaaacttggtgtttccactcaagggagttggggatcacgtaacaccctccacttccacctgggatttcaggccatctgtgggagtgcaagagcatggtggggtggaggtcacaggaaggtggaagcaaagccagggcagctccacatgcagccccctttcaggaacagcaaggataggccggcctgtatcttgttgctcagagcaggtgatcctgtcatttggacccttgtgaggagaatggatgtgagtgtgcacctggttctcttctcctggggctgagggactgtggtcttggattatcacatggtaggtgaggtgacaaaatggagggaagtagcctgggtggggactggggtggccactgcagagctctagctgatggtggccaggtgggaatggggacctgggacttcacgaagctggaaatggagagttttatggggcatttcattcaacttaaaaacctggccgggtacagtggctcacgcctgtaatcccagcactttgggaggctgaggagggtggatcacgaggtcaggagattgagaccatcctggccaacatggtgaaaccccatctctactaaaaatacaaaaattagctgagcgtggtggcttgtgcttgtaatcccagctactcgggaggctgaggcaggagaatcccttgaaccagggcgtcggaggttgcagtgagctgagatgtcgccattgcactccagcctggtgacagagcaatactccaacttaaaaaaaaaaaaaaaaacctgcaggccatacaaaatagggcctattgggtgtgaagagctacccatttgtgacccctaaccttgcatggtcttgaccctgtctctgcctctcctctagtctcccctttcctcttgtctgaattgctgctgcttaatcctctcactaggagcgagaaaattgtactttgccccttagtgacagctctgataaaaggtggttgaagtggatggtagtaaaaagggtttgctttagctgtggttttccagcctccggactcctccccctttcccatcaccatagataattaagagttgactcctcaaaattcctcccaccatattgcatatttttaggcttcaggtttttgtgaaccaaaatagtggaaagtttttttgtttgtttgttttgggtagcccaaagcaacacttttctacagaggcagccattctgcacgcacaataacctggtgaacaatgccagctttctattaataaatgaactgccagttcagaatttgtacccatgtggcagatggacagaaatagtttctttaggattgatctcttaaatttgactttgggaagatactggcagtccaggttttgtgacagagatccatcctgagatctttgtaaatggaaaagcctgaatgcagcgtttcttattgataggagagttgatggatttcaggaaaatgggatatagtagatgtgcaatgaatttgttgacttggaaacaaatttggacacttatccctgaaaacttcaggccattttttcctaaactctaattgagtccctgtgattggagtactagccccacagtccttatcaaacttcgcatttggagcaggcagtctgtctgggaaaagccaggaagctcgccatgaaggcatcgccctctgcttttaacttttttaggctctgttacctctgcactggcttgagtatttcctggctcaattgtttctcaggctggccttgagtccttagatgttatttgtgtgcctagaaatagctggaagaaaaatggttgtaatgctttgcattgctcactgctctccatggatggaaattctgtgagggaaagagggctttccacccagaaaaagagctgggcagcgtagacttcattgtcctgctggcctgtcatgttattctgctatactacagcgattaggatgagagagtttctcgctctccctgggtgtgccacctaaggtacattagggtagggacgaacatggcgggagttctcatagtgggctttcctgccagacgtatggcccacacagcagtatttcttacatgtggttcttttttttttttttttttttgagacggagtctttctctgtcgcctaggctggagtacagtggcgtgatatcggcttactgcaacctccacctcccaggttcaagcaattctcctgcctcagcctcctgagtagctgggaccacagatgcatgccaccacacctggctaatttttgtatttttagtagagacgtggtttctccatgttggccaggctggtcttgaactcctgacctcaagtgacccactcgccttggcttcccaaagtgttgggattacaggtgtgagctaccacaccctgccaaggttctattatttgatctatgttctttgtttgtttgtttgtttgttttgagatggagtttcgctcttgttgcccaggctggagtgtaatggcacgatctcggctcaccgcaacctctgtctcccgggttcaagcaattctcctgcctcagcctcctgagtagctgggataacaggcatgtgccaccacacccggctaattttgtatttttagtagagacggggtttctccatgttggtcaggctggtctcaaactcctgaactcaagtgatccacctgccttggcctcccaaagtgttgggattacaggcgtgagccaccatgcccggcccctgtaaccatttttaagtgattgatcatctcagcatgattgatggagatgatggggttggccatccattcttttttttttttttttttggagacagtctcactctgtctccaaggctggagtgcagtggcacaatcttggctcactacaacctctgcctcctgggttcaagcgattcttctgcctcagcttcccaattagctgagattacatgcatgcaccaccatgcctggccagtttttgtgtttttaatagagacagggttttatcatgttggccaggctggtctcaagcccctgacctcaggtgatccccccacctcagcctcccaaagtgctaggattacaggcatgagccaccacacccggcctattcatcatttattgagcatttatttatacccactatgtgccgtaaacaaggtgctgagtaatgagatgtgaacagaatagtccttcttcttgtcctcatggagcacacagcctagtcggggacaataggcattaaaaaataccaacaatgaaaacccaagacatacatagagtgttccaaattgtggttttattttttatatatatatattcatatatatttatatatatttatatatatattcatatatatttatatatatgaatatatatttatatatattcatatatacttatatatatttatatatacttatatatatttatatatattcatatatatttatatatattcatatatattcatttatatttatatatattcatatatatttatatatatttatatatttatatatattatatatatttatatatttatatatattatatatatttatatatttatatatttatatatacttatatatatttatatatttatatatatttttatatatatatatttatatatgtataattttttttttttttttttttgtgatggagtctctatcacccaggctggagtgcagtagcgtgatctcagctcactgcaacctctgcctcccaggttcaagcaattctctgcctcagcctcctgagtagctgggattacaggtgcctgccaccacgtccggctaatttttgtatttttagtagagatgggatttcaccatcttggccaggctggtcttgaactcctgaccttgtgatctacccgcctcggcctcccaaagtgctgggattacaggcgtgagccactgcgcccggtgtgattatttttatgaaggaaaagaccagagtcctttaagaggggacagtgggggacttgcaatagattgtgtgggagctgtcaggggagactttccaagatgatgacagtgaagtgaggcctggagggagagttagagccaacctcagagaagggaacactgttctaggcaggaggacccagggttgtgggaagagagaaataaaatgagaccaagacagtggggagagcagtgtgagttgaagtcagaggggtgacagcagccagaatgtgccggtagcgaggatcttggattttattctagctgcaatgagagctttgattctacaaatatttattgcgtgctagtcactgttttaggtactgggtgtacaacagtgaaaaaagaacttcccagccgagtggaatgccgtggagcatatctgtttcgatgctgggacagatccctaacacagctcattaaagcagatagcaccattccgtctctttcttcagcttcactttacgtcagtcccagcatttttatccctacccttacagatgagagaactaaagttcagagaggtgacgtgacttgccccaggcccctcagtcagtaaaagacagaactgagaatccaaccagactcttccctttttaggttatttctctaacattagggccgagtatcgattctctttacctctgacttcgtgtccctggtattaagactcagggcccacagtgcctcttggaattcaggcatatggtgacatcagtgtgcctaccattcaggtcttggagaatagggtatggcgaaaggagagaactcgtgatatcgctgattcagtagcccagagttgtacgagtccttgggtgtttcaccttcatccaggcatctgagattggagacaagcatgtggctgaatgacgtatctgggggaagctgtctaaacagccgtgtggagttggagagttgaattagctctgtggccaaacctctgggctcagtctgcctatatatggcttgatctcaaagaacaggtgatagcagtaggagttgttttctgtgttgctggtgggagatgcccaggcacattcctttgtagacaagcacaaactagatatttttgaaatcggaggtctgaaaccagccgaagaattaatcctggcctggaaagcatatgggagagtacagccaacctggcttgggtgttgctttcttggttttgttgcatttttgaggcagggtcttgctctgtcacccaagtgggatcacagtggtacaatcatggctcattgcagccttaacctcctgggctcaagtgattctcctgccttattttttgattttttttgtagaggtgaggtctcaccatgttgcccaggctggtcttgagctcctgggctcaagtgatcctccaccttggtctcccaaagtgttaggattacaggcgtgagccgctgcccctggtgactttgttgctttttaataagcccagaaatttctttcaagagggaggatctttgtgaacatcttgagccgcgttcttgatcgctggctgtggaagcctccacctatcaggctcaagtccatgttgctatcatgtgcactttggctggtgaggtgctgagcagaggtttcagcctctaccacaaggtttcctgatgaaaggtcagctgggtgggcccagcttctccttacccaactgagaggcctcatagagcacaaggcctgggtacggaggttcctggggctcctgccatacccagccaggccaagcagagggccccagtgtgttgttgggtgctgagaggctgcccgcagctctcgcctgtgttggaaggctgtagacttggcttctcccaaacgtaagctgtgaagccatggactcagattctcagcctggccctgctacttactgtgggaccttgggcaaggaagtctccattttctcttttacaaaatggggccaataatctgactaccacagggctgtcaggatgcagcgggatggagcctttatagggtcttgttctgtgggatctggagtcccatatgggagttattagttgagggacgaggcatctgggaatctttattcaactaggaaacttcagccaaagaactaatgccatagagatgtcttatggtgtctgcatttgaagccagcggttctttgaaaatttatcctgagttccagaaagccaactgctagataagtaagcattgagcatttaaggggtcctggaagtaagattcctggaaagaagcagcaatctcttactcatccccgattatctcagacacagagtggtggatggaacctttgtggtttaggggctgactcttggtattgctggataaggaatatgagccagtagagacgagtgtgttgtatagcagtgtcctgcgactgggctggagacgtggctgagggaggccagggggcctcagagtgcacgggaggaggcttacagaggtcttttgcatcctgcagaacaccacatgtgtccttccctctgggaaacctcccacccgggcagggcctctggggccggatgtggaaggtaaacaggctgcctttctgctctctaccacagacaggcccggaaaggcctgagtaggagcttttcatctcaggaagccctgaggtcccacagcttctcctgaagcagcctcattgtccctttgtaagagcatgaccaggtgctctagctcctggagcaccagtggagaactagagtggcccaggtgctgatgccaagttcgagcaacagctcctggcgggtttccctgcatccccccactcactcccatctattcttcacataggggccaaagaacatcctgcttgacatcttgatcagtgtcccttgccctcaggatcaaacctgcaagtccccaaggccctgcaggatctgttttctcctctctgtgctccgggcgcatgccagctgcctctctgctccatgctcattcctgcctcctgagggacttcacacggggcccttgcctctgcccctttcgcctcagctcgccacctacctcctcctcattcttcagatggcagtttatgcttcactatttgtagggccgtcgcacctgacacctccagcctaggttaggagcatgtccatcacctctacttctccttttaactccaaccatccttggctctccctctcgagggtcacgagagcagagagagaatctattttgttcaccactgtgtccctaccatgtgggacattgtcaaggcaaatgtaagtgtgcactaaataaatatgtattgaatgaatagatagccaaacagacagaatggatctgccacaacacaaacaggatgcttttcaagtgggcagaagatggagacatcacttgtcgagacactcaaacaagtggctggatggatgagtggcagatccattctgtctttctgcttggctttaggagtagagggatcacccatggtccatcctctgaggacaagggtatcatgaccgcccaggccccactcacccctgccaggctcattgcatcccatctaaaagtgtgctctggaaggtcataagaagtcctcacctgggacacttctaggcccagtgttcagccagctgtcctgagttctgcatcagtccctgctagatatgaaacacaaacaggatgcgatgcttttcttttttttctttttcttttttgagacggagtctcgctgtgttgcccaggctggagtgcagtgggtgcaacccctacctcccgggttgaagtgattctcctgcctcagcctcccaagtagctgggattacaggtgcacaccaccatacccggctaatttttgtatttttggtagagacaatgtttcaccatgttggccaggctggtctcaaactcctggcctcaagtcatctgcctgtctcagcctcccaaagtgctgggattacaggtgtgagccaccgcgcctggccaaacaggatgctttgcaagtaggcagaagagggagacatcactgtcccatggagaggtgggaaaatcatcgttagcacaggataattcatcctattttgtgctcatgtttactgagctaggattgacctgtgtccgggcagcagggacacagaggtgagtaagacaaagagaaggcccttgcccttaaaaatgatacgtgtggctaaaacgctgtagacctttttgttttttcctttttgagacttcctttttatacagaaattgctacctgcaggtaaaattaacttacatcgtgaaagcgacagtaaagtgtttctagggatagctaaagacctaagaacacagccctgtggtttgactggctggccaccttcctgcagctgggtttactatggtgctgtgttctgggacagcccactcgtctccatttattgggctgagcctcgagacctgcaataccagggaaggaagggaagtctaggctgtctttggtggccattgttatttatggggcatcggcagagaagtcagtaccatggaaaatctagagaaagatagaggatacgcagtgtggttgagcagaatctgatagctccctggctctctccgggccatgggacccagggcgacacagccaccctttttctctctgctgtctggcttgggcttgggctttgtctcctgtgtccctccacaccttcttcgctgtcagtggtgaccaatcccgtggaatcagccactgtgtgttaccccaagtccttgcccctgggacctcgctctgttcggagacaaaacccgggactgtttctccttttaaatgcaaccttgttccacaggagaggagaaaagcaagaaagaggtggcttgtttatctgatggtagtggggtgtgctctgatatgcctttgaaaggggcccagctttgctttgcccagcggcctttgcaggataatgagagaaggaaaacacagggaacttagtgggaatttgaaactggagtgtgggagtgggaaagttcagcttttaccttggagcaatccagtctttctcctgtaggaaaacagaatggtgctgtatggcctccaagctgggttacatcctgggaaaaagacacgtgcttggctattggcctgggcgcagtttatgtgtaagcctttccttgtggattccattttcttatttcccgaatacttctcagccccacaagtccactgagtcttctgtctccagagactgcctggtttccatccccgagggcatctgcgcatcacttaccatggtgtaccatgcacctccagtgtgcccggcactgtgtcaggagctggggatacaggtgctggtccccacctcactcccctcaacctctgcaatatatgatacataacccacacacacagaccatatgcaaaagtggtgggactcctttgtacctgtcacctgcatcagtgattatcagcattttgccagacttgtttcatcagtgtctcccaacacactccccccagacattacccatacgtgctcaaatagatttgggtgtgcgtgtgtgtgtgtgtgtgtgtgtgtgtgtgtgtatttttttagagacagggtctcgccctgtcacccaggctggagtacagtggtgagatcatagctcactgcggcctctgaactcctgggcttgctttgttgcccaggctggtctcagaactcctggcctcaagcgattctgccaccttagcctcccaaaatgctgggattacaagtgtgagccaccgcacccggccaatgtatgtatttttaaacataaccacatactgttatatttaatgcttctgaccatgtcttaagaaaaaaacaaaaactccctttggcttccttgacatcacagtctctctgtttctctgactcttcttcctcatctcctatggctaaattctctccctctgtccactgcttacacatgggcatttcacaatgtcctttttccctgaaggaacttaccccctcccctcagccttaagtaccccatctgtggggatgatgcccatgcctgtagtcctgactcactcaccacgctctatcgcagttatttactgatgcatctctctcccctatcagacgctgaggtctttgatggagcaaccttgtatttgtccgtgtatccccagcaccacacctgtccatagctggagctcaggaagtttttttttttttttttttttttttttttttttaaagtcagagtctcactcagtcgcccaggctagagtgcagtggcacaatcttggctcactgcaacctccacctcctgggttcaagcaagcacgtctgggtaatttttgtatttttagtagagatggggtttcaccatttggccaggctggtctcgaagtcctgactgcaagtgatctggccgcctttggctcccagattgctgggattacagacaggcatgagccactgcgcccggcctcaggaagtagttgaatgagtgactgaatgaatgcccacgtgagcaaatgacctgtttgctgaactttagactgacgttgcctgatgcccactgcttgtgcagtacgtacttcagtctcagcgtgtctgagaccaaactcattttcaagtcccacttcttgggcttggcattgcccatttgtcagccatccgagtcagaaaccttggagtcagcttttgacttctcatcctgtaacaggcaccaagtttgatttctttcccttgaatatctcttagaaccctcaccttcctccttctctttattcctaccattgtccttactcaggaccatatagtgagggtttaaaagtgcagagtcttggccgggtgcggtggctcacacctgtaatcccagcactttgggaggccaaggcgggtagatcacctgaggtcaggagttcgagaccagcctggccaacatggtgaaaccccgtctctactaaaaatacaaaacttagctggatgtggtggtatgtgcctgtaatcccagctactcaggaggctgaggcaggagaattacttgaacccgggaggtggaggttgcagtgagctgagattgcgccactgtactctagcctgggtgacagagtgagactccaatctctagaaaaaaaaaaaaaaaaaaaaaaaagcagattctaaactcacagtgctgctgctggctgcctgagcttgtgtggctttggacagatgacttaaccactctgtgaagatggtatctgatgcacaggaaatgctccaacgttggctcttgtcgtcatctgtgcccatgtctccctcagcagcctcctgactggccttctccagtctcctggtttggattgaggctccctagaccctacctttctgagactggtatctagtcaggttactctgggagatctccaccccccactgcccagagagcaggttctgagctcttcagtctctccaccttctggccccggctgacaccatccctgccacttctcctggggtccccaaacatctgtggtacttttgtctttcttgcccttggtgttcccactctgcagaacaaccttctctccaggtcaccactgatcgcaatcgcgctctcctttcaaggcccagatcaggtgtcacctgacctttgctgtcctcagatcacacctccctgtagcgactggctcgccagtgtccctctctgaccgagctgtgcactcctccagggcagcactgtcagggtctcccccagacccttggttgtgattctctctccttgtcctgaatctcagttttcctgatacatgggatgctacctgaaggcaggtttcaactttcaatctttttttttgttttttgggtgagatggagtcttgctctgttggtcaggctggagtgcagtagcgccatctcggcttactgcagcctccgcctcctgggttcaagggattctcgtgcttcagcctcctgagtagctgggaccacaggggcctaccaccacacctggctaatttttgtatttttagtagagacggggttttgccatgttgaccaggctggtatcaagctcctggcctcaagtgatccacccacctcagcctcccaaagtgttgggattacaggcgtgagccaccgctcctggcctggaggatttcagatttaaagcaaagaggatattttccaacaaagcaactgcttttcttttttctttttaaattttgtttatttatttttaataaagatgggatcttgcatcttgcccaggctggtctcaaacttctggcctcaagtgatctgcctgcctcagcctcccgaagtgctgggattacgggtgtgagctaccatgccctgtctctttttttgtttgttttttttccaaattgaaacagggtctcactatgttgcccaggctggattgaactcctggcctcaagcagtcctctcgccttggcctcccaaagtgttgagattagaggtgtgagccaccatacctggccctgtagaggggaggcattgatgaaggtcaagaagtcctgttagctctgccttcagaatctaccccaggtccttttagttctctccagcctcactgctggaaccctcacccaagccaccaccttgcagtccacacacggccactgggattggggcggcgttctccgcgcgaaatctggctgtgctcctcccccatgaggccctccaaaggcttcctcttcttaggatgaaacccacactgccagccgaagctcctcaggctcccaccctctacaagctccttctgctccagccacactcaccaggcccgagttcccacctagcaccttccctgggaatgatctccccctggttggctctttctacttattcagcctcaaatgtcatctccactgagaggcctttcctgacctgctgagcttgattccctcccctccccagtcacattactccgtgttatggtacccatccctgtctccttagcttgtttttgtctgtattggctcttccactagactgtaagttgcatgagggcagggatgtctgtttaatcccagtgctcaggatagtgtatggctcgtgatagatgcctagtacattttaaaatgagaacgaatgaagtttgggagaggctcagagcagtgagtctcccccttgttgggggactggggagtgcctgggaggggctatctggtgccagcggtttggagtggctgggatgactctggaatcctgtgaggcccagtcagtttctttggttctcatgcagtgcagtgccctcagacctaaccattttgttccgtgctggcttgaaagggtctgcctccctcccagtgcagcccctgcctctcctctttctcgccccccgccctcctccagagaaagcaggtggtgagggctctctaacccagacaggacttgctgttcagccccagcttgaaattgatttcctccagccctccttgagccaggccccgtgaacagaggaggggtctgagccaggcctcctaggccattggtgggagggagaatgagacagccatttggcccacaggccaccaacttttcccccccttctctaaaagacacacaatggcagttgggctgcacctttgtgagtcaccggtgatagcccatcataaattgttatttcctatatttccagagcagctttatcgggcgttgcctgtgcagtccgggaaccgatttggtatggggtcagttaacatgctgtcttgttgaaatctgtcatcatgcccatataaggcaaactccttggattactttttaccttggcagaatcacaggaatgtcaaggtaaccaggccacctcagcatagctctgattctcacccggtcacctgacttgcccgccctcccccatgactcacccagtggctcagcatggggcctgctgcactgtggctgctggaatctgccaaggacctcctgggactgcccttggttttgtgtcttccttagagtagatcaaatgagaggaaccatgtgaagtagctcacacagggcctaacagagcaaacacaagacgtggaaagcagacttggtgaggcttgagtttagtttgggggttgcgggggtcccagctctgctgcttaacagccctgtggccatgggtatatcccccagcattcagagccttatctgtaaaattagagcacgcagaacaaaccctggtacacactaagtgctcaataaatgtgagtcatttgtgtaattatagtagggtaggccttatgccccacccagtcataaaaatgcctcttgctgttgttggttcaggctcagccccttagtggctttcatggggcaggttgacatggtacccagagtcctcctcggtcctcttcccatggtgtagtgagagcactcaggaccacctaggcctttcctagaaaactgaacccacaccttcccagtgctgccccaccctggtcccccaccccctgcaggacaaaccactcctcccttgttttggggccaggagtcagatctgcccctgagagcagcaggggcccctttgtcctttgacgtcatacccacaccgctcctggagacagccaccccttcatgccagccccaggaaggcttgtaggtggggcgagccagggtgagagtgtagccctgttcctcggccagggcagatgtttcaccatttttaatggagcaattatgagtcagaggtttcagtctctactggttcctcccgatcctataattactctttggctatagaatcctattttgatctcttcttttcttttctcttctttctctctctgtggtcatggtcaggtttttctttttttaaatcctcccaagacactgctaatgttgtctgtctcatgcatccaaggaatctgagatggactgaatattgtcaagggaaaaaaaaagagacccccaaatccagagtgatttcttaacccacccaaatggctttttgtttgtttgtttgtttgtttgagacggaatctcgctctttagccagggtggaaggcagtggcgtgatctcagctcactgcaacctctgcctcctgggttcaagcgattctcctgcctcagactcccaagtagctgtgattacaggcacatgccaccaagcccagctaatttttgtatttttagtagagatagggtttcaccatgttgaccgggatggtctcgaactcctgacctcgtgatccacccaccttggcctcccaaagtgctaggattacaggtgtgagccaccgtgcttggccaacccacccaaattgtgtaccctacaccatcctagtgcttgggagccaacacccactcacaggaggctaagggcaagtttaggtaactcttaacaccacgaattagttgcctgctggcaaacttcaaactccaagcctgaaatttctggttggagtcacctcccagatggactcagggattcattcaccccctcatccagtgctcacggagcctctgtgaggtgcaggcctggagaggagccctgtggcctcagcaaagggcaggcaggctggtgagcacccaacctctggatcgaggggactcaattatgcggataaaggcccctaatcctctcagtgctccaaactcactctgcttctgaaagggatcttcgtaccctgggttcagagagtaggaagcccgcagggaccgagtatgcatgaaacaagcccaagtctgtgggggctgtacatggtcaagatcacagatttccagaccaagccagctccaccctagctgggatgcccaccctgagacacccctctctgctttcactggaataggatggccctgacttggccgggtggactgttgaatcagagcctctcaaaacaggaaaaaggaaaaggatcaccaagcaggagtttcagttgtcaaagacaaaacccttaccacgattaaagattactccagggcctcgcatattcacccttccaccagcagggcccagtttacggatcatttgaatactagcaaaaaaacaagccatctgctggagagattgaacagagggagaaacaggagtgtttgccctgcttccagacacccctttcctgtggcagttcctgcacctggcaagatctactggggaattcccggggtcccactagctcaggacgggtgtgtagcacttgcctaaataacaatcccatcagtgccctgtctgaccttttctccccaaatgccaaaggcctcttgtctggatgaacaaatccctgggcggatttgtccagactaaaacgttaattctaaagactgggccccttaggcactcgctaagattccaggccacactgtctcaaggccagaattggcttacttggctatctttttgaaagatcaaagtttaaaccagatgatctgtagtcccccacccccaccctgaaacctgagcttagctgtaagcattgaaagtaaatggggtgtttgtagctcaccctccctgttctccaggtgaagggccccgtgtgcctgatcatttcatagcaaaatgctagatggggccagaggaggccccagcctctgctgctgccctaattttaaaactgccttttgggagtgtaagtttcctctgttaaaggtagttatttcaaggtaggcctcaccatctcctcctcctggtgagaagctctgcctggagggctgagcactgcctcccgctctgtgggccccacctgccttgggttgagacctatctcttcctggactctgtgtggggagtgcaggctcttccccttggggagaacccagttctttgacgtataatctgagtggtttgggttggttggttggttggttggttggtttcccatgtgtgggatggctccggaagtctgtttgagaacagaggcaggctcagatgggagcagctcctaccccgggccgcctatccccctttaccctggggtttcttttagctccaagcatccattccagtctaacaaatctggtggcagagtctcttttttttttttttttgagacagagtctcactctgttgcccaggctggagtacagtggcacaatctcggctcactgcagcctccgcctcctgggctcaagcgattctcttgcctcagcctcctgagtatctgggattacaggcgtgtgccaccacgtctggctaatttttctgtattattagtagagacggctggtctctactaatagttcaagacggctggtcttgaactcctgacctcaaatgatccacctgcctcagcccccccaaagtgctgggattacaggcgtgagcccctgcacccagcccctctggttctactgagacctcagatctttcatttatggaacaagggggttggattagattgttcgctctcagccctcacttcatgttagactcactaggtggactttgtcaaatgtcattgcccagggcccaccttgagggaatctgtctcattttgcctgtggtgaaattcaggtatttttaaaaagctcccaggtcccatacatctattgtcaattgattttcaacaagggtgcaggaccattcaatgggggaaagaatagtgttttcaacaaatagtgcaggaacaactattaatagatacccatctgcaaagaatgaagttgaacctttacctcacaccatatacaaaaattaactccaaacggatcagatacctaaatgtaagagctaaaactgtaaaactcttagaagaaaacacaagtgtaaatctcatgaccttgggttaggcaatggttattagatatgacagcagaaacacaaccgaagaaaaatagataaatcagactgtttcaaaactggaaactttttgcttcaaaggacactattaaagtaaaaggacaacccgcagaatatttacaaattgtatatctgataagggtctactgtccaaaatgtataaaggactcttaaattcaacagtaaaaagacacaccagttaaaaatgggcaaaggattcaaatagacacttctccaaagaagatctacaaatggtcaataagcacatgaaaaggtgttcgatgtcattactaattagggcaaatcaaaaccataaccactacaaatggtcaataagcacatgaaaaggtgttcaatgtcattactaattagggcaaatcaaaaccataacgtggttgggcctggtggctcatgtccataattccaacatttttggaggtagaagtgggaggatggcttggggccacgaattggagaccagcctgggcatcatagtgagaccctgcctctacagagaattaaaataaaaaattaggccgggtatggtggctcatgcctgtaatcctagcactttgggaggccgaggcgagtggatcacctgaggtcaggagtttgagaccagcctggcaaacatggtgaatgaaaccttgtctctaccaaaaaaaaaaaaaaaaaaaaacccacaaaaattagctggacatggtggtgggcgcctgttgtcccagctagtggggaggctgaggtgggagaatcgcttgaacctgggtgggagaggttgcattgagccgagatcacgccattgcactccagcctgggcaacagggtgagaccctgtctctaaataataataaaaatgagaaattggccaggtgtagtagcatattcctgggaggctgaggtgggcagattgcttgagcccaggagttcaaggctgcagtgagctatgatgacaccactgtactccagcctgggcaacagagtaagaccccaaccctaaaacaaaaaaaaacagaaaaccacaatgagataccactgcacacccaccatgatggctataatcagaaagtcagataataagtattgactaggatgggagaaatcagaaccctcacattgctggtcaaagtgtaatgtggtgcagcttcttgggaaaacagtctggcagttcctcaaaatttaaacatgttttgtatttttagtagagacggggtttcaccatgtcacccaggctggtcttgtctcagcctcccaaagtgttggaattacaggcatgagccaccacgcccagccaagttcctcaaatttttaaatataagaggtatcatatgactcagcaattttactcctaggtatatgcccaaggcagttgaaaacatgtccacataaaacttgtacatgaatattcacggtggtgctaatatccaaaagatagaagcaacacaaataatgcccatcagccaatgaattgataaataaaatgtggtatatccatacaatggaatgttattcagacaggaacgaagtactggtacatgctacaacatggctgaaccttgaaaacatgctaaggagaagccaaactcaaagatcatataccatatggttccacttatatgaaatgcccagaataggtaaattgcaagagacgaaagaaaggtaggttagtggttgccaggggctgggggctgggtaggagggaagtggggttggagagtaactgtaccagttttgcggtggtagacatgttccttgtatttttggttttttgttttgttttgttgttttgagataaggtctcactgtcgcccaggctagagtgcagtggcgctgtcatagctcactgtagcctcgaattcccaggcttaagtgttcctcccacctcagccttctgagtagctgggactacaggcaagagtcaccatacccagttaatttttaattttttttttctttttctttgagatggagtctcgctctgttgcccaggctggagtgcagtggcgcgatcttggctcattgcaacctttgcctcccgggttcaagcgattctcctgcctcagtctcctgagtagctggaactacaggcgtgcgccaccatgcccggctactttttgtattattagttagagacgaggtttcaccatgttggccatgagagacaggactagctggatttcctaggccgactaagaattgctaagcctagctggggaaggtgatcgcacccacctttaaacaccgggcttgtaactcagctcacacctgaccaatcaggcagtaaagagggctcattaaaataccaattaggttaaaagcaggaggtaaagaaatagtcaaatcatctatcatctgagagcacaggaggagggacaatgattgggatataaaccccaggcatttgaggcgggagtgggccaccccctttggttcccctcccactgtatggaagctctgttttcactctattaaatcttgcaactgcacactcttctggtccacgtttgttttggcttgagctgagctttcgctcaccatccttcactgctgttcaccgccatcacagacccactgttgacttccacccctccggatccagcagggtgtctgctgcatttctgatccagcgaggcgcccattgctgctcattcgggctagaggctcgccattgttcctgtgcggctcagtgctcgagtttgtcctaatcgagctaaacactagtcgctgggttccatggttctcttccatgacccacggcttctaatagagctataacactcactgcatggcccaaggttcaattccttggaatccgtgaggccaagaatgttaggtcagagaacaaaaggcttgctgccatcttgggagcagccactaccaacttgggagctctaagaacaaagacccaccggtaacagccaggctggtcttgaactcctgacctcgtgatctgcccgccttggcctcccaaagtgctgggattacaggcgtgagccaccttgcctagccttgttctggaattagtggtgattgttgcacgatcttgtgaatatactaaaactccctgaattttatgtaaaagggtgaattttttggtatgttatgtgaattacatttcaatttttaaaaattgattctccaaattatgtacatatttaaagagtacatgaaagagagggagagaaagaaaagctggatgcgagatgccgcaacctgattccactcactcctagatttgttgagtacctgctatgtgaaaggtaccagtccaggcagtgggttcccacagcaaacagaaccctcctctggggagcttatgctgcacttgggagggagactggttatgaacaaagaacatagtttttgatgatgaaaagtgcagtgagtaaaacaatgcagtgtgaggccgggtgtgttggctcacgcctgtaattccagcactttgggaggccgaggtgggcggatcacctgaggttgggagttcgagactagcctgaccaacatggagaaactccgtctctactaaaaataaaaaattagccaggcctgtaatcccagctactcgggaggctgaggccagagaatagcttgaactcaggaggcagaagttgcgttgagctgagatcatgccattgcactccagcctgggcaacaaaagtgaaactccgtctcaaaaaaaaaaaaacaaaaaaaacaaaaaaaaaaacccaacaacgcagagtggagtgatagcctaggggagatgacagagtccaggaaggcctcctgggttgctgacatttgaggcaagtcctgagtgatgagacaaaaccagctctataaagagctagacgaaagtcttagaccagtatttctcatgaggaggagacagcactccaaaatccatcctttggcctggcgcggtggctcacgcctgtaatcccagcactttgggaggctgaggcgggtggattacctgagatcaggagttcgagaccagcctggccaacatggcagaaacccgtctctactgaaaatataaaaattagccgggtgtgatggtgggtgcctgtaatgccagctactcgggaggctgaggcaggagaatcacttgaacccgggaggtggaggctgcagtgagccgagatcatgccaccgcactccaacctggcgacacagcgagactctgtctcaaaacaaacaaacaaacaaaatccgtcctttgcagcagcaacacgcacgctttctggcacctcaaaggggattgtccaagactggaacactggctgcagggagggggccgggtgcaaagagctggtttctgggtggacacgcaggacctttggaatgctcgctaccccactcagcagtatttatacctcttctccaactgcgaagtcagagctttttcatgcaggctgagaaaactccgaataaggcaacttcaggccaggacataagacgcattccatatttcactgtaattgctttcaaattaggttatgtcgtcatgtaacaggcacacacagtgcacttgctttgcccctggctggggttgggtcctggacaggctgccccgtgtgtcgctgaactgccgcagtgctagccctgattgcctgggcagtagggctgtctgcgtcccacgttgctgcacccatctaatttgtggctgtgttattgtgacctgctcgttttctgttctttcaacctgcttcctggcttttatctccttcagaatctggtggcagtggatcttcaaaaagtgctcaggtgtgcagtctcacaggccagaggctccacgggcccccttgccagggcgagcatctctgcctgtgccgctggtaacccagattccagaaggcttagccgtctggccctgaaagcgcctttatagttggtgatgaagcccatgggctggggagccgtttctgctttcaggaactgaaaagatgccccagtggggctaggccttgcctgaggtctggcaatagcctgccagatgggtgataagaaggcctacccaggtgataagcctacccaggaataaatagctgtacctcccctgtgtccaagccctggacacccttccctaggacccatggaagcaggaaccatgggcagcgtcagaggccacagcaggcaaggtggaagttcaggaggtgggacggcgccctccccctcaaagcaactgatgccccagcggagcgacaaaccctacacggtatttcagagccaaggtttgaaaactcccagggtgctagggagctccgtctggcctccgggtacctggggttggggctggctgtggccagttgcagtcaaccctgagcctgggcaaaatgcatgcaggctggtcctcctgggtgatatcctgctaggcgggtgggcagtgtacacggcagaagagggttgcggcatgaggcagcaaacgtttttttctaaaatcttgtcaagcgtggggtccgtggaatccacatgtgagcatcagcctggtgggtggggagagtgaagcctgcgatccagtctggatcatgtgctacacagtgcagagccggcatgctcacccctcctgagggatcgctcgagcctatttctaggcccaaagcgactttgcaagagactccctttattctgggcttagtggaattccagcttccaacagccatttccctccacccccttcagttctgagaacatgttttgtaacaggaaggcaggaagaaaagagaaggcgagtttgttcagctgggtcagccgcatcccaccaaggccctttcttccctccagctcaccatcgctctgcccactggaaccactcggttgccctgtgtctgccgaatgtttgtttcttaatcagcgccccagagtagagagggctttgcctcttcgggttgagggagggaatcattgatgaatggctcattaaagcccactgctgccacattcctgggtgcttaggtcacctcctgaacaatatccatcattcattcacctaccgccccacatcctggcggctgggaggggtccctgtgacgcaggaaggactttatgaccagagatgctaggtctccgtctccctcctgcagcccacagtgacaaagcagaaactgctcttggggccccctgaagcccgccttagctgggtcaccatgggccttggcacacggaggggtgacagtggatcccaactcaactgacaagcttgcctttctctgttcttccaccccccttccccgcactcacaccctgtgctattttagcaaccagagaagcctctttaataggctgcccgtgtgcaggggcaagctctgaagcctcctctctgtggtttggttcacatgtgttctcaaagacagatgagtccacatccttccttcctccctagataggtcaagggctgggtgcaggctgccttcacaggagggccagggacaggctgggaggagcggggccaccttttgcgaagcgggtgatctgctggggcgttgctctgcctgcctgccttgttctctgagtttacctctagcttggggaccaagggtgggctggggccttctttttttttttttgaaaccgagtcttactctgtctcccaggctggagtgcagtggcgcgatcttggctcactgcaacctctacctcccaggttcaagcgattctcctgtctcagcttcccgagtagctgggtttataggagcccgccaccacgcccaggtaatttttgtatttttagtagagacgaggtttcaccatgttggccaggctggtcttgaactcctgacctcaagtgatccgcccgcctcggcctcccaaagtgctgggattacaggtgcgagccactgcgcccggccctggctgggggcttcttgacctgactctgctgtctctccctcactggccagcacctcccattctactcagacatcgtggaatgaatgcccaccccgtgtttgtatgtatcatctgtgtctgtgtgacattaagcaagtcactgaacctctccctgcctcagtttcctcatcaaatggagatatatcgcatgtgatcatggggttggaggttttaaagagttgctaatgtgtaaatagtaagaactagcaattagccgttatagcataattacctttaatatgtcatgccccccgcacccccgtgctgaatgtaattttgcgggggggcgggttgagacagggtctggctctgtcaccgaggctggagtgcactaacacaatctcagcttactgcaacctctgcctctcaggcacaagctgtcttcccacctcagcctctcgagtagctgggactacaggcgctcagtaccacgcctggctaatttttgtagtttttgtagagatggggttttgccatgttgcctaggctgatctcaaactcctgtgctaaagcaatcctcccgcctcggcctcctaaagtgctgggattacatggtgtgtgccaccatgcctggctggccagaatgtaaatgataactgttttgcttcctcctgtgtccagtacataatagggctccaagtcagtatttgtgaggcaggtgcatgcctcttagttgcggtcctgagggcatggccactgccacgttctggacagtcagagtcgctgctgcccctggaagatgaccgcgatcatgaagcccaggagagctcgatgctttttgcctttccctcctcccacagagggctggcagctctggttcctcccaaatgaaatagaaaccttgagtttgcatttcttctttggcgtgccggcagggcacctctgccttcctcttcctgccagggggaggaagtttctctcaggggctcttcaccctgctttattcctggccatcacacattgacccttgtccccttcggctctttccctgcatggcagggacagcatgaccgtttaatggctttgtgaggccagcatgccagcctcacttctttactcccttccttctcggagtgggctctgtcccttctgcaggagggctttggcacatgctcttcccagtatctggaaggtctccctcatttttatcttattaactcctcatccttcagctcagagtttgagaatgacttcttcaaggacacctttctgtgtctgcctcaccagtcgcttggtgcccccccaccccgccaccatgctgaccgcactcttcagctcccatcccaggggaggtgacacaaactcggccccaggagcccagcacctggctttaaacccagctctgtaactttctaggtgtgtgactgatgggagcaagccacttcacctctcaggccctccgtttcctcatctgcaaaatggaggcagtactagcacctccctccagagatgattacgagggtgacagaattagtaagtgaccaagtgcctcgagcagtgcccgcccctagtagactctatggaagtgtctgctgcagttattgctgttattattaccacttttcctaagggcgttatttctggagtggactgatcgcttgattaatgagatcagacctggagcctcatgagagtgtctgcttttgctcactgttatggattcagcacagggcctggccctctgctgacccccagcatatgcttgtccagagaatgaatatgtacggacccatggtggcctggggcatcatgaggtcggctgcccacattctgagaattttgcatggtggagggcggcgtggtgggcgcatagggcccccatctatagaaaccacctctccacaccatccaccccacgcagcgtagtctaaaccgggtagggagaggaaggatggaagcagagtgttatttttgtaaccaagtagaagaagcgatgaatttttaatgtcccattcgaactccagctcctactcaccagtctctccgcatggagaagtggccgtcatggtcgacctgttcccaagggtggccttgtgagtgcaggctctcctcaccagagctgagggctttgtgaacctctgatgtcaatagatgcccctcatcttccaggaggacaaaacagggcaaagcaagacatggggtgagaacaggagtgcatcagtggggttccccaagcctgtgtcaggtccggatctgggtgggagttcccttctgcgtcatccaggccaggcgagtgggcatcctccctgagcacctgtgcttggggctttgcctgtgtcagtcaggaagacagagtacacggaagagttaccattgctttcagagcaaaccttcctttgacatgcatttaacacagcacggagtgattgacatgtgtccttgtgtttaatccctatcttaacctctcggttactgtcctgtttatcagtgaggaaactgaggcttattgcttgcctgaggcctcagtggcagaagcaagatgtgaatccgcacctgtgtgatgcccaagccagagctcttgtttactacccagagaagatgagcacaggtgggatgtacgtatggagggcgggtagggcagcagcccctctgaggacaggtggccagaacccaagcggcgaggtttgttcacagcctccacagggtggggtggggccatccgcagagggtctcctgccatcccattttccctgcataccagtgggtggtctgagagcctttgcagagaagagactggatctcagcacgtgcttatgtgcgtgtgtacatgcacacacatgcgtgtgattcatctggctcttactttatgccaaggagcctgtcacatgctttaaatgtattttccctagtttaattcttagagcacactgcaggaggtagattctgataaatccatcttacagggaaggaaacagacttaagtaggtaaagtcacttggttgaaaacatggaatgagtaagccaaggggcaggtattcaaacccaaacccaggtctgtgcccctgcagagcctgcaggagcagcccacacaggccaaggctgtgaggggtgctgtttgcacgcgtgcgtggccctccctgcagcccaggtgcctaggtctgggcctggcaacaccagagcacggggccttgccctcggggaacagccctcttttgtcctcaggctgtgggatgtgtcttggctactttgctgcccagcagtgcctgctctcaggcacatgtgagagtagaggcctagcatccgtggccacttccttcccagcccatttgctgctgccctttgctctgcagggctgctgggctcctgggctccacgcctgcttgctgcctgccatcaaggctggcagtgctctggggctgtaaaggtgcaggcgccgtacttcccaacccctggagctcgcacatggtaggagagaaagctcatgtgcatgcaacatccaataagactaaaagtgactgggggttgctacgggagaggtgctgagggtgggccggggacagagcaggcacactgtggagggggtgggcaggactcctgagaccagggcagggagggaggagatgctgggaggcacagggccatccagagagctgccacttcctgagcattgccatgcacgctgcaggcatggccatcttgagtcctcacactgcccgtggcctaggtggggtcttcatccccacgttgcagaggaggaaatggaagttaggaaggttaggtgacgtgcccacatgagtggtgtaagcatggttcccgccctgggctctctgaattcagtattgtatgggggaggctgggaaggtgagttagtactctccgcagtgagaacctgccttggctcccctcccctcaaggagttcatagccgtgggagggagggagacaagaactgttggagacaagaactgttagagaccagagagcaagggcgtgatgtggtctgcagggaggaggctgtctgaggcagaaccgggtcagggaggccatggtgcgggtaccctccaggcacggcatttggcctgacttttgaggggtgcccagggttggctacatggcggggcggaggtatctttagtgggggaacagcgttgtgccaccaggaggggtctctgtctcccaggtagaggaattctccatggtgagaggtggtggtgggggatggtctagctgtccactcttgccccctttcggatttggaaggaagccccatgctgggtccacactggtatggcgtattaattaggcagctgctttgtctgggagggggctttgtgtcgagtctccctgaatgagcagggctggcgacagttgtcaaaacacatggtgcttggtcagagcccccgtagaagccccttgtcctccgcatggcctccgcctgcacccggggcgtggaatgtgctcttgtgtgtccctggctgtctgcttgcttctacactggcccctgcagatggagggggtggggtacaggggttcctataagaagcagacacttggggtttttcccaggtcctgttgcaggagggtgcgtgggctggtttccctgaaggcgcctgggcgtgttggtgttaactgatctgagatcttctgtggccctgatgtctatgagcatgccccagcttgcagggggctgagtagccgggcaccaccaggaggctgcgtgccctgtgcttgggtgtacccatgccctgtcagcatcgttggtctgttagggtcagggacttcggcttcttgtttagtaccctccatcccttccagttgatcatcagaaacattctccttagatgcggctgcctgaccccggtgagggggcctgcctcccacttgccttccagcctcctctaagctgcactgagtcttaaaaataggaaggatagggctgggtgtggtggctcacgcctgtaatcccagcagtttgggagaccgaggcgggtagatcacttgaggccaggagttcaagaccagcctggccaacatggtaaaaccccatctctactaaaaagacaaaaattagatgggcatgttggcatacacccgtagtcccagctactcaggaggctgaggcatgagaatcgcttgaacccaggaggtagagattgcagtgagctgagattgcgccacagcactccagcctgggtgacagagcgagactccttctcaaaaaaaaaaaaaggaaaaaaaagaataggaaggatagggcatggcatgttctccaggagacagagggacgggggcatcttgcttgcaggaagccaggcgacacaggcgtgtgtgcagggctcagagggtctgtgttcctggcctttcctgggagggcttgctcttgggctgcccaaagctcaaagagagactcgaggaaatcctgcatttatgggagcttttcttttcctgccactttcctgttctgggttgtatctgtgcacgtgattggaacgtagcagcctgagctcctgcctgaggagagcagccacgggtcacggaagccagggtccagctggggcctttgggtctagctggcagatgaagggctggccttcatcaagaaaacaagccccatgagggcaggagcccgacctgttcattccacaccaccgagcctggtgctcagtcatgtttgtgtgactgagtgagccggcggcgggctgaggcgcttttgtctggtgtgcgtactggtctcccttgaggcagcttgggggtgtggaaaaagcacatgttgccaaaattgacagacctgggttcaaatccaagctctgccacttaccgcctggatggtcttgtgatgggtcattaaccaccccgagcctcagtttcctcacatctgcctcccggggtcactgtaaggatcagaaacaatgtgtgtatcggccatgtacggtgtgtgtcggcgagtgctccgtggcagctgcggttctcctgaggtcagagctgcggccctgcaggtgtgtggagagagccccgacagccaggctgactctgcgcactgtcctttgttctgcttccccagaccttcacggcatggtgcaactcccacctgcggaaggcaggcacacagatcgagaacattgatgaggacttccgagacgggctcaagctcatgctgctcctggaggtcatatcaggtgagactcccagccacgcagtgcggccgagccctggcacaggtgctctgccacagcggtccccagagaccctgcccacccagctgtcccattgctcctggggaggagagggcaccccttaatagctgcacggtggtctgatgggtggggccagagtggcctggtgggccagcagaggaacctgcttttggagaacagaggagactctaaagcctctctccctctcgccctctctccctttctctctctctgtctcgccccctcttttctctttgtgcacttctcaggggagcggttacctaagccggagcgggggaagatgagagtgcacaaaatcaacaatgtgaacaaagcgctggactttattgccagcaaaggcgtcaagctggtctccatcggggcagaaggtgagctggaggtggggcagcgagggtcctgctcggtttctgacctttaggctctgaagcacaacatctgcatcctgaagagaagttttgttggtggcagggcgcttggggcactcagagccccagtacatactcagcagtgatcacaacaactgctcttgatatgatgctgggcccacaagctcccccaaacccttggaaaaatccggtgggcgcagtccaaatctaggaagtgcaacccacccaaccacgggggcgacggcttctgcagggggaggaatggttttgactcggactcaggtcgccctcactggttctccttgtgccaggctcagcagacagtgacaaacatgtgccatggcctctctctgtaccaggaacacctttctcattatgccctgcccggtatcagagaaggactggaggccccatgtcaggcattgggacagggagtgcacggccaaaggtcagtgcctagactttgccctgtgtgcatgggcttggagaattttgcctctgaccaccccaggatcctcctgggccccacgtagataaccaggaccacagtccactacctgcaggccctcactagagcagcaggctctcagcaggggcccctgggttgagctcccaggcgcttttagagacaggcgaggcctgatggagccccagcagcatgagctcgcagtccactcattagtcagagtaagatttcttcaccctgacatccatgttgtcccagcttctagaaaaacaaagtaaactaattgccgttaatgacagggctctgagagtttggccaagactccgggccagaatgtgtgtgctgagttccaaggctctgccccggcccaggacctctgcgatgaggggtgccaagccttgcatgccacagtcgaggtggttggtgtttgtttaaaaaaatcacaacccaaaaattcagtcaggccctgagattttctgtccttgcatgggtctttcctccaggctctgttccagccttctgcttctcacagctgcatttattttgctcaaatgctagtctgtaaatacagaaggggttagaggagagacccatgtcagtcatcagttttcatttggagaaaaacttggtctaaaaatgttctctgttcatgcccaaattggttcactcccaatccctgtgactgtggggccttggaacaaagcctaatggaggcgttcctggggctcaaggcacctgagaaccccgccccaccctgtccccctgtccttccacatgattgggcattcgcgggagcattggcttcccgtgggggtgatgagaggggccggaggcacagctgcaggtcagagaagcagctggtggatgtgtcatgagaaacgccatcctcctctcctcaccggaactccataagccctccgttaccagctgcacctgtacttgctgagccggggagctgcggccttgcccagctctgcaggcccggccctcaggaggtgcacagaatagatttcctgaggctcgagctgcctcgctgcactaaggggcaggtggtgctgctcagtttctgggtctggggctctgaaccctaggacagggtggacactgggtccctcccctgtctctgggcagcagaatgagcatatttcctcctctcaaaacccgaaagctgtggctcatggacacccccttcctctgggtgtgtccccgggggaaggtgagccccatcttctctgtgacctctccacctgcttccaagcaagcctgccctggagtattctgctcagaggtcagtgagcagggtctcctgtggtgtcctgggcctccagctctgcagttagctttggaactcacccctgtgcccagcccttccccgagagtgcttgcagcagtggcgcccctctgtcttctttggaagccactccatcatgccccttgcatatggcgtgttgacaagttgggaggactgccctaggcacggctggctgatggactctgggatgaggcactgccttctctcacccagccgcagacacacagctgtcctgggccttgcagagatgatttttctcttaagttactgaggctgaagaaggtgtggtccaagcccttcttttgagaagtttcagcaatttttttttttttttttttgagatggaatctcactcttgtcacctaggctggagtgcaatggtgcaatctcagctcactgcaacctctgcctcccgggctcaagcaattctcctgcctcagcctccagagtagctgggattacaagcacccgccaccacgccaggctaattttgtgtttttagtagagacggggcttcaccatcttggccgggctggtctcgaactcctgacctcaggcgatccacacctgcctcagcctcccaaattgctgggactaaacaggcgtgagccaccacagccggccgcaaatgtttgtttttaggttagttcagaaagcgtgcagtctggcctcaggcccgtgctctccccttcctgacaacacagcagccatgcttgttcctcactggccttccaggcactggatccagtggtggtcagagcagccccgccctcacgagggcaggcagacagtgaacaagtaaacagcccgaccaacatgtgatttcactagtgatgccttggggcagcacaggggccagggagaggaactgggtggcgggttggggagctccttgggacgggcagtcagggaagccaccacgagaggtgacacaagcagaagcttacacgatgagaaggaccagccagttgagggtcgcaggctaggggcgtgctttgtgagtggacagagcgtatcaaagcaagaaagagcctggcttgcccagaggatgcagctagagaattccagcaggatggcagggcctgggccttcagggcaagccctttccctgtgggccaggcatggtggctcacacctgcaatcccagcactttgggaggccaaggcaggaagatcacttgagcaggagtttgagaccagcttgggtaacataataagacccagcctctacaaaaagtttaaaaactagcaagatgttgtggcatgcgtctgtggtcccagctactcgggagactgaggcagaaggattgcttgagcccaggcagtcaaggctgcagtgagctatgactacaccattgcactccagccagccagaccctgtctcaaaagaaggaaaccaaccatgctcgctgctgtgtcgatgtggattatgggcgggaagggtacataggaggcagccgcattgagctctggagatgacagtggcttggtggagagtgtcggcagtaggattggaaggaagtggacagattcacaataaacaataatgtagtgcacatttgctgactgcgagatgaaaaagaccacctttgccctgagagtgggggcccggggtgcccccctgtagtcaggaggtacgcagattacggcagaaatgtacagagcactgagagttgagagaggtgtgaacagaggccacacgcctgggaccagcctcttggaggagcggttttttgagttgggtcaggagaaggagctggctgcggggccagggacccttgtggccagaagcctgcaggcgctcagcagcaggaggctctgggacagtgctgcctagagactgttccctgcattttctcctgagggaggtggaggaggacaggcctgggagatgcaaccagggggtggtttggagcctttctctagatggggctggaaggccaccttcaggttgggcggaggagcctcactctggttttaacgaccttctgccctctgcccccttccctgtgtgcagagattgtggacggcaacgcaaagatgaccctgggaatgatctggaccatcatccttaggttcgccatccaggacatctccgtggaaggtgacagccacctgtactgcccccgcttcccacctgagtcagggcgggttagaggagagctgaagtgtgatcttcatgcttcaagcctcttcctgtttccttggggtcactcacagggcctggcccttgcaggggtagtcagtgggtggcaggtgaagggaggctcctcccagctgcctgcctcttggctccagtgccttccgagtgcctttgctctcacagcctcatctcagtggaccctcacgccaccctcatgagatgggctaggatggctgggcccgttttacagtccaggaacccaagtcccagaacagactagtgagagagttgggcctgggcctggttctctgtctgcttgacatccccatccttgaaacttggcccccatggacccgttatgagctcaggccgtccaggaatggacaatttcgcttccctgcaagcacctgtgtgcacacaggatgggcagagccacctgggctagcgtgcaggggctcccaggtgccaggtcgcagtgatgactgggagagatgtgcttcctgccctcgaagggctcccggtctgtgaggacagccgagctatccacggggaacagaagggccccctaggcctctctacagctggtatttcaccttgttcaaaagaggccaaggccggtatcaagggcctgtctgcagtgtgttctggtggtgaaaggcacaggcttggtggccaggcacatggcacagattcaggccctgacaccaccacctcctggggcagccctggtcaagcgactctcctcggggccgtgaggattaagcagggccgtgtgtcctggcagttgggcctggcagcatccgtctgcatccggaatgggagtggctgtcccgctgctatcactgctgctgttgttaggacagatatcctctccccttgggtttcgtttgaccccaggcctgagccgaaagtcccatccaacttgggctgagttctgagggtttatttttgagccagtgctcactgtctttgtgtgttttgcagagacctcggccaaggaagggctccttctctggtgccagagaaagacagccccgtataagaacgtcaatgtgcagaacttccacatcaggtaagcgccagtcctggtcatcctctcctttcctctaggaacctgagatccttcctcccacctgccctgtttgctgtgtttttgtcgtggtctgtgagatgccagccctcagtcagcccctccctggccacgggccctacaagcccatgggaaggtcacctggtcctctctgaggaagaggaggcagtttcccagccatcctggctgaaggcagtaaggtcagccctctcgccggcctaatagaacgttcttcgtccccaggcaaggtgactctcagaagcaacaataaagcttttcatttttgagacagggtcttgtgctgtcacccagactggagggcagtggtgtgatcactcatccctgctgccttggcctaggctcaagtgatcctcctgtctcagcctcccaagtagctgggactgcaggtgcatgcagccacacctggctaatttttaatttttatttttagtaggaacagggtctccctatgttgcccaggctggacttgaactcctgagctcaagcagtcctcctaccccggcctcccaaagtgctgggactacagatgtgagccactgcctgcctctggcctcttcctttattttgacagctcaggagtgaattgtttttagaattgctagtaaatttagtgttggggaaaaatgtactctgtggctgctaagatgaacaagcctcagctccaccatgaacctgcttccctcagggtgagcgggagatgagacatgtccaccatccccgtagctgaggcgagcatgggcactgccgcatgaggtccagggggcggcaagaggcaggcctgcctggtggttgggagcactggctctgggggcggtcctgaggtcagatccggtttgccttgtggctccaccctctgagtctcctggatggcccgcacaggaatgaagagcagggcctcatggggtttgcagcggcctcaggctctctgggacccttgctgggtacagagggcttttcccatcgtgctcaccctgatagcatgtggtccctcccttggtcactcttctctgtgtgtcttcttttttttcctgccactaactgactgaatctttctatagtttccattcattttcttcaactagtaagtatctagcatgcccgctgcatgccgttagtggagatacagtggcacccaaacaaagttcccatttgtgggaagtttacaccacagcgcggggaccagctgttagcacagcggccagtaatcctgcagcataacttcagtgagaagtgctgcacaaagacagggaagtcagatgaagaaagttccctgggtggcctttctgaggaggtgacatcgagcttgacctcagagggaaccaacccttagagggtctcagggaggagaatgtgacccatatagcttgtaactgaccaacttgtggccttggggaaggtctctttcctccagagaccagcatgccaagtgaaatcctggcatttagccagcccacggactggccttcctgtaagtcaggtccgccagggtgtggaggccacacagcacaaacaccagcatcctgcagtggccacctcccccgaagcggcctgtctggttcagggcggcctcccatggaaggtgctagcagttataaagcagttgtcaggagtcaggcactgatccaagcatttactcatttaatccgcacaacagccctatgtagcaggtatgtcactatccccatcatacagatgtggaaaccgagatagcctggcttacccgaggtcacactgtcagtaggcagaagagtcaggatttgatcacagactgcctggccccagaggtcatgcttgcagcctctctgccacactgtctccatgcagtgcctggcacaggccagactgcagtgaatgggaattagtcactgctgtgggtgcacagggccatacggcactctcatgacagtgagcgggccctcctataacctttgcctttccttccccagctggaaggatggtcttgccttcaatgccctgatccaccggcacagaccagagctgattgagtatgacaagctgaggaaggtgagtgtctccagctccccttgatggcccacagacgtgccctgtctgaccccctaactccgggtcaccatccccatgcccttccatcgccagcctccagatctgggttctgcacgcagatgggcagcctgggagagccttgtgcaggctctccgcaacccctggctcggtggctgactctcacctcccttattcccctcgtggactgtccagtctccctccatggcactgcaaccaacccggggttatttaagggcctggccagccatgctttataactccccttcctcaatcttctggattctagaacctcctctgcccaaaggggcagagggcaaggaattccaaaccatcaccacaagcccatgttgcccatgcagggtcctgctgtcatttgcctgtacaaagcctgtatggatccaggccctggccaccagaagctgccagcctcgtgggggaaggcaggacaaaaattgtgtccaaagcaaagcaccacaccaggccgtgtacatgtgctcaggctgaatggggtggcagggcatggggtcagatcagtgctgcggaggaggctagtgtaccccgagcgagcaggagccaggaaaggtcccggaagaagaggcagcttagagccagaggagggcttcctgggggaggcaccagatggcacccagcccgttccagccacagtgagcaagagagctgggccccggccagggagagttggagtgcagtgggctttagtcctgtaagcagtggggagcctgtgagggggctgggggacactttagggtggttgggacctgggacctctcggtttgctccccttacccagtccccagtgctctctcaggcctggcccacatcttccagtcaatgtgaaaaccaggttttagggcaaggggcttaagctagggtctgtgggtggctggaaattgtatgaaaagagtacacctgcatttttctggagaaaaagccctggtttgccccacaaagatttcacgaggcactcctgtgagtgggaattgaatttatccaggcggtgccctcccgctcacacatcacacgtggctgagaactgcctgaagaaacccccaaccctcgccctcccgggtctctccctctgggccagccctgcctccctcctgctcctgcaccctgccctgacggagttcttgttgtccccacttgcctccttctaggacgaccctgtcaccaacctgaacaatgccttcgaagtggctgagaaatacctcgacatccccaagatgctggatgcagagggtaagtcatctcttctgttcagccaccactgtgcttcctgatggccttttctgtccagggctggcctcgggcaaggggctgtgggcacatcagagctttgggtcaccttggggagctggcagagccagcaagaagggctgaatgattctgggtgaactggggacagccatgtcgccctgggagacagagcaagggtagcctgggctggccagatgccttcagggatgaagaagcgtatggggagggggagctgaaggatcaactctcctgagggtgcatctcctcagggcccaggaagggcaaggtggctgaggaggggtgcttcaggcttcctgcgagcaaccctggcctctccctccctacctgcagcaggcatggagtatggagcccgacaaagtggagtgttttgttttttccttttccggctttgctccatttcccagccatgcactgccccatttcctagccatgcactgccccagctgggacctgtgtctctggcctctggtggcccttggagttgactgtcctgctgctccttgaggccattctcagagagaggaagtggcctcattttaatccgcttcccacagccttgtcctttccagacccatgggagagggaggggctgagggtgtggctgagcccacccaagtcacgcgtcactctgcaggtccctctcccccaaggccgtggccttgggagcccgtggatcccagtgagtgacgcctccaccccccgccctactcgggcagtttaacccttgttgttcacttgcagacatcgtgaacacggcccggcccgacgagaaggccataatgacctatgtgtccagcttctaccatgccttttcaggagcgcagaaggtaccgagcagggccaggcaggccctcctcgccgccaccgcgcaatgccgccgctgcctctcgcctcccgtgctcacctcatttctcttgcagacggcagtggcctctctccaactggaagccacccccagctccctggcgttgctgccccctcagccttagctcacacacctattgggtacctcatctgtgccaggcttttccaggcattgaggatgccctggtgactgagtcagacaaggtccctgttctcagggcacttccatgctagtgggagaaacatacagcaggcctgtcacaggagtggaatagagaaaatggggccagatgggggacagagatggctggggtgaccttcagctggtgctgtcaatgtggaggggtgaagtgagcaggtacttgcagcaggagctgctagatgcaggctggggcacaggtgttccaggcagagggtgaagcactacgaaggccctgagacaggaagaagcttggcgtattcagggaccagctagagaggagtgagtgacacgcagtgatgggtcaggcccaacaagacccttgtggtgtgggataagaaattcatgttccactctgagggccatgggagccccttagggtcttactccgtggtgggagctgctcactcacattttcagacagatcatttagcaactgactcctccaacccaaaacaaagctgcctttatagggcccacagctagtctgtctccagcccaggccggttagaaaaggaatgcaccctattcggactccacaaaaccccgcaaggcatgtccacgcaggcctggggctggcttccagtccagagcaagtgctcttcctcctgcatgagcctcaggccggcccggccgccctccctgcgtctttcactctctcctgcctctctctctctttctctctctctctgtgcagatattgtgggcactctgaggccagatgagaaggccatcatgacttacgtgtcctgcttctaccacgctttctcgggggctcagaaggtgagctgggccaggcacacctcgctgctggggctgcagacctgccttcaccaccgcccttgcatcaccgctggccatctgtggttggagccctggccaggccgtgggccgccacaccacacagactgaccctgccggcctctgactcggaaggtcccctggggcaggtttcccgcctggccggtgctgggcctgtgctgaggagtcacagacctctgtttgaacacagcccaccctgggaggtgggtggtggcatcctaggctctcaggcggggaaactgaagccctgcattacagtcaatggcagagctgggatttgactgcccggcgttcccactcgccctgtccatcatctgcaccagggctgcctgcctgcccctgccaagcccttcgtggggagcactgggctttacccgttttgcagctccttcctgccaggaaaggctcagcatgtgcagcccaacctgcactcacggtcccagccctccagaggccaggcagagcccacagagcttgcgtggcagtggccgccctcctgggcccagctgacctcatgctgcctcacagctcctgccgggccctcagcgttcacgcagaggcccaagcactgctccccccgcttgccttgtggtctctgaagtatctcaggcagcattcccgatgcctgctttgaagtgtcagcagttggcacaggttcagaggaggaggcagaatcgattcttgtttactgaacatgtactacacgctaggcaccctccaaggccttcacatgcacaggcttccagagggtccctgtgcacacccccaggagggctaggcgcagttagccccatttgagagaggaggaattgaagtttagggaaacagctattcctaaaactagaaggggggggccgtaccttctgtggacccctgctttgagcctcccaactagcaggtgcattacctaccgtcagtctggcctggccccactctgccacctcttggtactgtgaccttgggtgggtcacttgacctcagcttccccacctgtgaaatgggcatcgctgtagttcggtctcacaggattgttctgggcgtgaaacgagctcctgcaggcaaagggcttagcacagtgcctggcacggcagctgccatttaggcagctgccagggagccacagtggtggggagtgtggttcttcccagcctcgggccagaaaggcctcttcacctcctcagcatgcgattggagcttgtgtttggagtgttctgctagagggcacgggccaggagggtggagggaggacccctgacccacactcccgcgggagggtgggcagggaccagcagcaatggacgattcgtcaccacagaccccaactaacagcatgtttgccattggactcacccctacgggccccgaaccagccccctgcccaccacatggcctcaccagattgcttttctttctacccacactgctcccctgtgcttagggctgaactccagtctggaggctctgagggattttgggggagcagggactggcaggcaagcccaggacagtatgggtgggtgctgaggcactgggcctggaggcttgtcactggcccctctctgagggggtagtggaggcccggctgcagggcgctggctggtcagaaaggaaagtgctgggtccctgtgtgctcctcaggacagccccgtggtgctgctcctgctgcctcgtttccccagagacccagtccaagctcttgcaagagtgctctctggggttcatgttttataaacgcagagtgaaccccaggtctagcgccagtgtgcccattctgtcctgagatcatttatttctagtcaccgaagcgttcccgcctcgttcctttattcactcactcattcagcaaccctgaacaccgccagtgcactgagccccaagctggatgcgggaactcagcggtgaaacatgattcccttgccttgcggcagccccgtgctcacagagaggacttgagtttcgggtgccagttgtctctgccaagttaggagtcagggactgacctctgtgacccccacaagctgcagccctggctgtgttttccacactggcctggggcccatgttcattggctgaggaacctcttggacctcatctctgaggagcaccgcctggggccctgggtgtgtgtcccgcagcatggcgcggggtgtgcacgtgcgtgtgtgcgctcacacgagcaccggctgccgcctccccgcctgtctccaggtgccatgtgtggaggggagaggctgggcgtcgctgcctgcagcactggctctgagccgttggccaagcctctccattttccttccccatcactctgtagaccctcctcactctttctgttcctgttctgttgccgtttcaactcctcctcttggaccctttctgtgcttcctgaaaggtacctggtctctctctccccgtgtgcaccccctgcctcctctacactgttcactgccccctagcaggacagggcaggacgctctcctgtagttcaggcccagggactatgtccaccactctcaccctccaaagccccagcacttttctgccccacggatggtgacttctgtcctctggagctcctattaacattgcctccaaggcaggagagtggacaggcctgagtgtgctcctgtgcacggaccactaggctcctccgggacccgggcgcccctgctctgttgcccccagctctccagctctcggcttcccatcctttcaccttcccaccgggagagactcctccgcagtcttaggtccaacgcagccgacccgtccagcctcaccctcctctgtgtggggcactagagggtttgcgagcagcagtgggagggctccccaaccctcctcggtgcctccagggtctgggctttctggacccaggggcattttgcagtcagcagtgaggatgccaacaaggcctattgggacagggcaccatctcactggagctgtgcttcctctccttcccctctgtgaggagttccgtgggccatggaccagctgctttcaagggacgtgcccgtcaggagggagggtggccagcccccaggcagccctgactgtgtgctcccctccaggctgaaactgccgccaaccggatctgtaaggtgctggctgtcaaccaagagaacgagcacctgatggaggactacgagaagctggccagcgacgtgagtgttcccccagtgaaagtcagggccacctcattatcctcagccagaggtcactgtgactcttgcagggggaaagcaggtgtggcagcgagatgacctagaaaaggctgcgtggtcacagaccatggcatttagccagctggtgtgtacacgacctctccgtttgcttccacaaggctaagggtcagaccggcagccaccttgccagccagcccctgggctcccgagcttgggttcctacagagatgctcagggacagtgtttcctgggcacctcagtgctttagaatcacctggggagctttgtgaaagcccctcttcccgtgccctggccctggagagagtgattcagaaggatggagaggggcctgggaaccaataggatagcaggccctgtgcaggtgcttaacgagcagcccagcaagacgggaactcggattatcctcctttccaagtgaggaaactgaggcccagggagggtcaggcacgtgcctgctgttacatgactagtgggacagagagctgggcttcacccaggcagccctgctctagagtccaaacccaatgcttcagttggaaataagggtggttagtacaactcttctggaggctcttcatttttgaaatctccatatttaaaaaataaacgtaggctgggcgcagtggctcacacctgtaatcgcagcattttgggaggccaaggcaggtggatcacttgaggtctggagttcaaaaccagcctggccaacatggtgaaaccttgtctctactgaaaatacaaaaattagccgggtgttgtggcacacacctgtagtcccagctacttgggaggctgaggcaggaggatcgcttgagcctgggaggcagaggttgcagtgagccaagattgcgccactgtactctagcctagcgacagagcaagactccattaaaataaaaataaaataaaataaaatttcccaaagagcagtggtttgactgctcatctagaaccagtggttcccagattttgcaatctcatagaccaggaaaatttgaaaaactattggatgtccaacctaagagggccagctttttattttgccaagttacggatgttttaaaaagaaacactaccatctgttaccaccagcacttctaacaccaagataaggtaaaaaggttattcttagaaccccagccattgccaagaaagggcagctggcagcacgcctcacaatgtatccacacagaggtatttctgtctttgaatttctcactttgccagaagttggcatttgggaaccacttctccagcttgtccgtgctggcagataactgattttgtacttctagaattgttttattatttttttgagatggagtttcactcttgtcacccaggctggagtgcaatggcacgaccttggctcactgcaacctctgcctcccaggttcaagcagttctcctgcctcagcctcccaagtagctgggattacaggcgcgcaccaccacgcccagctaatttttgtattttttttagtagagatggggtttcaccatgttggtcaggctgatcttgaactcctgacctcaggtgatccactcacctcagcctcccaaagtgctgggattacaggtgtgaaccagcgtgcctggcctagaattgttttagaatgtccaactgtttgttaccctttctcactccattaaagatctgagtagttcctaaaagaatatgtttgtttctttttcaattttattttctaatttatgtcccaggcccagtgcacatactggcctagccagactgagccaggtgggcttgtcggccttgcccttgaggcacttagtgagcccagaagcagtcaggctctcagcatggagctcagtgaagacagcggcagtggggcatgtgacagcatggaaagggacctttttggcgggggcatgggagtggaggtttcccctcttagacctgagggaaaagactaagagcaaaggcatgggccaggcatggtggctcacccctgtcatcccaccactttgggaggctaaagtgggattgcttgaagttcaggagctcaagaccagcctgggcagtatactgagacccccttctctataaaaacttaaaataaaaatcagccaggctcggaggtaggcacctgtagtcccaactacttgggagactgaggtggaaggatggcttcagcccgggaggttgctatgatcatgccacttcactccagcctgggtgacaaagcgtgaacctgtctttaaaaagaaaagcacaggcaggaacaggaagtaacaagagaacagtacagtgatgcagggacagggagggagcccacgctcccagagttccaggttgggggttctagcaggaatcgtggagaagttgggctggggagcaggggtaaccccctaaggtggggccctcaaagatccagatcccatgtgcccataagctggggggcagcccgtcagcactctgagggtcccccacaaaggccacgctggcttctgtggcccacagctcctggagtggatccggcgcaccatcccctggctggaggaccgtgtgccccaaaagactatccaggagatgcagcagaagctggaggacttccgcgactaccggcgtgtgcacaagccgcccaaggtgcaggagaagtgccagctggagatcaacttcaacacgctgcagaccaagctgcgcctcagcaaccggcccgccttcatgccctccgagggcaagatggtctcggtgagcaccaggattcacatgggagcagctgtgaggggcagaggcagccctagaactgcctgtgggcagtttggccagcgtaatctttcctaagttgttgatgtcctgtgggacatggcatggcctttcggatgcagtggtcggggaggggtgcacttcactcggcattgtgctcccctttggccctcactcactgtattttacacccagggttttatacgcatcccaaatccttgccacgggttgtgtgggtgtggagtggtgtgaatttggagccgtggtctgccatgatggcatgaccgccatgtgcttgaggcccttcatcagcggaggggcagtgcgccctggacggtaccacctccccatctatggtattcatccattcattcatgcactcacccgttcacgcattcattttgttaatccagaattgattgtacctgctgagtgctggggggccctgtgtaggcatccaggtataatagcaaagcatgacacagacatgaccccagccaagttctgccaccttcccatcagcatcccttggagacatccccctgggtgcctccacttccttgtgatagccctgcctgctcctgccctgccccaggacatcaacaatggctggcagcacttggagcaggctgagaagggctacgaggagtggctgctgaatgagatccgcaggctggagcggctcgaccacctggcagagaagttccggcagaaggcctccatccacgaggcctggactgacggtacggcccagctctgccccactctgcccagccccgctcccgtgctcccctcctgtctctcaggcatgcatgggtgtgcacacacagccccctgccacgttgggtctgtttctcaggtgccctttcttgctgcttgggagcatgtgtgtgtgtcagaaatgctgctttagagccaggttcagtggctcacacctgtaatcccagcactttggcaggccaaggcaggaggatcacttgagcccaagagtttgagaccagcctgggcaacatagcgagaccctgcctatacaaaaaaattttagaataataaaattagccaggcatagtggtgcacacctgtggtcccagctactttggaggctgaggtgggaggattgattgagccagggaggtcaaggctgcagtgagccgtgattgtaccactgcactccagcctgggtgacagagcaagaccctgtctcaaaaaaaaaggaaagaaatgctgctttggattccttcagccccagaaagcagggaccattcaggggccaggtcctctttgttgcccagtctgccctcgcctcagaggtgggaccctgtcagtcatccaggaacacagccaagccccctccagcacttcagggaagtgaccttacacccatctgtttgtcccctctgcgtgtcttccccatccagggcgagtgtgtggggcaggcctcttccatcccccgcaccctgtgttcagagtcggcttccctctcccacacctctgtgagcgtggacggaaggctggggagcccatgttcactggcacgtccctcaggctagaggagggcctgcctcctgggcctgctgccggaccacagccagtgctcaccctcagacagtgctcacccactgccttcggcccacccttcagcatggcccacctgtgagctcctcccacctcccatcccttcccagagcctccttcccgggcctggctccccctgcaggagcgccactgtgctttctgttctcggcagccctgcagctgcctggccgttggctccagatgtgggatttcatcacgtccctggccctcttttgggtcatgccaaggttgagatttcagatcccaggggtctggaagccttcagaaagctgccagtgcctgggagagccacaagagccactcacaggactcctctcccactctggccaccaccttcccaacacagtctccctggccctccggccgccactccgcccagctgagcccttccttgcattcctgagtgcattttctcacccctccccaccctggcccgcatgcgagtgtgcagctccacacggcctgcagccctggccacggcccagcttgtgccctcctcacatgagctcagctcgccattcccgcggcagctgccagcctcagagcagcccagcccctttgctaccaggaaagagtgcgagtgagagagtggatagtgagggaggaagggcctggccaggccgggtgccgcacttccctcttgcctggcagaaaggcacccatgtgaggagagcgtgttagcaccgatgccatcttgtgtggttggtggcctccatccattcccggattcactcattcgttcaacagacagctcaggtggctccagccgtccttatccatggaggcctgggcgtcgccctgtggctgaaccttctgggggtctttctgcccacccatcagctcttcagtccctctacagggctccatgaggccctgcagatggtttcctgaggccaaggggctgggtgtggtggccccactggcattcctcccctgggaagggctctggggcagccttcacctgaggtgtttagaagccagctcagtctccggccagggcccagctggttcagcggcctccacacgtccctgccccacccctacctgactgggcatccacgcgggtctgcccatggcgtctgccagagcccccaggcaggctggcctactaattcccaagactcagagcctctgtcctctcaagtagcagttacgtgaaacaggacaggcaggccctccacaccccagggtctggtcgtagcggcctcctccgccctggggtgggtgggccaccttcactccacacccctcaccatcccccacagcccgcagcgggagggtcgtcgtggatgcttctctgagggacttgatttcctgggaatacgaccaaccccgaacgaccccttgtccccactccagttgtcccttggcctggatcccagatagctgtggcaatggtccgctgcccacatcctctcggtgcacccttgccaggactctgcggaggcagagggagatgtcacctgctgtttctggttcctgcccctgggagaaagcagttggagaagggaattgcaaggccgccttgtggctgagcctcctgccccagggctgcgcagcagggccggtggagccagagtctcccaggcctcccacttcttggccatcagtgccagagccgatcctgtggggagtctggtaggtgcctgacagttgagactgggagaggctgaggtgaggctggtactggctccatgcctgctgtgctcgaacaccacctcactgaaacttgagaatagttccatgccacacaggtactggggctggccccattttacagatgaaggcacaggcccagagaggcctcggtggctgcactgggcgggcagctgtcaggtgctgggacagagctgaggggatctccgctaccacttgggggaagcccaaggtggtgtgcctgaggcagggcccctgtaggagctggggtgcagccaccttcccaggctggcattttccctgcggttccctaaagaccttcacttgcttgcagggcttccttgagctttggttctgggatgtgtaattagccaggatcagggactaataacagcgttcctcctttcctttaaagggcctgatggtgggcccgccccaatgcacacaggacaccttaggacagcgtggggcacttagacgtggagaggaccaccacctgtgcgggtgcagggtcagggtcctagaagaagctggctctgatgcttccccttccccaagcctgctgggacatgggctttgaccccgggtgcttctccggatcaaagccctccagaaacaggtgctacctttctaagccgtgctaccacggcccgatttgtatggtttcctactaacaaaagttgctaagtttaggacacacaggttgagatggaatctctctctcaggctgagcaaccctgaagtgtccatccaggtccatccaggttacagttgggcttagagatccctggagggtacggaagaagattctggaagtttccatgccactgtcattggcatggaaggatgtggggtccacagtctctctttccctccctctgcttggacagcccctccagactcctgccccacagctgccgtgctgtggtctaagcgtctctctgctcctaccagggaaggaagccatgctgaagcaccgggactacgagacggccacactatcggacatcaaagccctcattcgcaagcacgaggccttcgagagcgacctggctgcgcaccaggaccgcgtggagcagatcgccgccattgcccaggagctcaagtacgtgcgggctcaggacactatcatcacctggctctcaccacagcctgcccagactggtggcggcagcacgccgaggcccagcctgcctcaaggcctggaatagggtccccagtgccccaactgcacctccttccagaagccagggaagggccttatgggatgaggccttttgcccatcctgtctcagccccaggtgggacacctgaaggatttggattctctagcaggagggaggtgtctggccccttgtcttgattcttcaggctttaggggtccctgggggtgtcacctctcctggccaccccaagtaggccctggtcccctgatgggatgggccccagcctccgttgctcccagccataggtccctgagggaaccaggctgcacagtgagcctattgttctgctcggccccttccctttcttgctcagaatacacttattgtaagagcttccaggcagccgggctccttcccctccccacccagtcagataaacttgtgtacacaattagtacgctgagggtcgcgctggtgaatggggccttattccaccagtgcagcggccagcagcagggcgggcccaggcagcaggaggcccaggccattacttcatggaaaatccacaggccctcgaggggcagcagggctcccaaaatagccatctgctcaaaaataggatccttggctataactgctctttccaccgacacccccaccccaccacagtcacccccaaaggtctgcttattcctatgagtccaaggcccgtttattcctgagtccaaggcccagccctgatgccccagtggagccccatgctgggcagagctggtttcctccccgactcactacccactactgtccgggtgctttgagggttccccattggctcagccagaggcaagagtcccgtggggccatcacagcatttggcacagttggggcactccaggggtcctgccaccaccacgtccaggccaaggagagcaaggtcacagatgcagcaccctcgggggtgtgggggtgggacacaggcagcttccccagtgacggaagagcccctggaagctggtaggaaacagacttgaaataaaccctaggcttgcccccttctcaggccctgggcaaagctatgtgaaacccattactctgctcaggaacaggcggtccccgaagcagctctctggacggtagccctgaaggaacggaagggagggctgtccgggtcctgtcttttctgctgagggggaattacagaggcctgtggaccgtccaggatgagccggatgggcagccctgctgagcactgattaatggcgatagcaaaaactcactgagctctcagggctttatgtgtaccagctcatttaatccccacagcaactgtgtaactgagggaaccgaggcacagagaggccaagaggtttgcccagggtcacacagcaagggagtggttgagatgggaatggagcccaggcccccagccctactgtggagcacagcctcagcccctgtccgctgtctgtggctggctcgcctgctccccatgtcctgttcctccccagagtcgttccctgccccctacccctcctcaggccccaaggcctggttgaagggccacactcttagctgatagtggcagaatgagtcagggatgggtgagcaggaggaagccgcttcccttctcacccctggttatcacctgttaaccagctctgttatcaccccttcccttctaccctgggggtcccatgggccagaaccaagctgtgatttgattgaccaattagtgattggttgctgatatcctggaatgttgactgccccaacaccctggcctgggaaccttgggggtagatgggtccaatccatctagccacttgcccttgccgagtctcattgctctctgcccggcccgcagcgagctggattactacgactcccacaatgtcaacacccggtgccagaagatctgtgaccagtgggacgccctcggctctctgacacatagtcgcagggaagccctggaggtgaggagggggtgacatcacccacggagctctgtgcccctgctgccccggggctggtggtgtggatagtgtccagacctgtgagctccccccacctcccacggagaggatgttctctgactcctcagggccctctggacccctccccacccctcctgctcacatactgacctgccttccctctgtccctgcccccttccctcccacacactagaaaacagagaagcagctggaggccatcgaccagctgcacctggaatacgccaagcgcgcggcccccttcaacaactggatggagagcgccatggaggacctccaggacatgttcatcgtccataccatcgaggagattgaggttcgcaccccccggccccccatcttcccaagagcctctgtggggctgggccgccccctcactccagctcctcccctagggcctgatctcagcccatgaccagttcaagtccaccctgccggacgccgatagggagcgcgaggccatcctggccatccacaaggaggcccagaggatcgctgagagcaaccacatcaagctgtcgggcagcaacccctacaccaccgtcaccccgcaaatcatcaactccaagtgggagaaggtgggccggggccatccgtaggggctggggcaggacggcggggctgggggccacctccctgaccgctcccacaccgcgtctcctctgccaggtgcagcagctggtgccaaaacgggaccatgccctcctggaggagcagagcaagcagcagtccaacgagcacctgcgccgccagttcgccagccaggccaatgttgtggggccctggatccagaccaagatggaggtgaggcacggctgagccccacagagctgagaaggttccaagagagctcccgtagtgagggggtccccggccagcccagggcctgcagactgaggcgcctggcagagcaggtcccaattctcaccacccaggggccgtgatcaccctgcggggttaggagagtccacagagcttgcgcctggaatcccggcacctggggaggctgaggcgggcggatcgcttgagcccaggagttcgagaccagcctgggcaacatagtgagaccccaactctacaaaaaatacaaaaattagctgggcatgatggtgcgcagcccaaggaggtcgaggctgccgtgagctacgatcatgccactgcacttcagcctgacagcgagaccctgtggtctctagtgggctacctatgggaggtgggtttgatccctgaatgccctggtctgatgattgtgagactcaggcactattgaacctctgatcctgtcctcccagctctaaaatggggatgaaaacagttaccttattacttcaacaaatgctttttgcaccaactaaccagccacatgagtgctgtcattcttacagcagttctgaccaccactcactgagcactcactacataccaggcaaccaggctggcagcaggcaacctcgtttaaacccagcaagcctgagagggggtccgggtgccaggcaggtcagccctgaggttcatgccagccacgcagcatgtggacttgtgggtgccgagacatggagtgcccgaggtcaggagctgcagccaggccagggttcagatcccaactctgcctctaacagcactgagctgtcctccgtgagcctcggtttctacctctgcagtcagggcctgccacagccctggcctcacagagaggtcaagggtaaaatgaagttgggcacagggagcgcttggcagagaaaacctccctgtcattgtcatagctgctttaacatgagagggcaggaccggaggggacagttgtgagcagtgggccttccctcccagggacccatgggccaaggccccaggccaaaggggccccggggaagatgcaggccagcagcgcgagtgggctcctccaggtggtcagtgggggcaggcccaccagcctcaccccaccgcctgcacccacccccgtaggagatcgggcgcatctccattgagatgaacgggaccctggaggaccagctgagccacctgaagcagtatgaacgcagcatcgtggactacaagcccaacctggacctgctggagcagcagcaccagctcatccaggaggccctcatcttcgacaacaagcacaccaactataccatggaggtgcgcggctgccccgcccgctggcctttccaccagcatggccggcttcctcactggaaatggttcgggccagtgagaagatagctgtctgctgtctgttgtttttcactctgtttaaaaattattgaagagaccagcactttgggaggccaagtgggaggatggcttgagcccaggagttcaagaccagcctgggcaacatagcaagaccctgtctctacaaaaaatgaaaatattagccaggcatggtggtgcatgcctatagtcccagctccccaggaggttgaggtgggcagattgcttgagccagggaggcagaggttgaggtgagccgaggtcatgccaccacacttcggtctgggtgacagagccagactctgtctcaaaaaaaaaaaaaaaaaagattgaaaagactagatcaaaatgtttagacatttttaaaaattacactttccctagcactgctctcatcaccatgacaatgcccctcacaggacaagctgttctaggggcccacagagggcaccgtttgccctgtggccttagcagtatcagccttgctcagggccagagccagccagcgggtgccgggtcagggcagcagctcccactggctaacactccggggacattacaagctggtcgccgtcatattggtagcttgagaaaccaaaagactggacactcttgatccaacccatacaggtccacagatgcttcaaaccagagttggcttttttgtttttttcccctgagagccagtggtgagacactgaccagagtttgtccaaacagtctccacagggatcccggcacaagattcatgggtccttgcccttctgctgcccctgtagctgggaaacacacttactgtggagacagacattggcagaggcagcagggaggcaccatggcccgtgtcccctgtgaggtgtacaggagagcaggggctttccccagggcgggaggacagttcacagtcctccacgtgtgaaccacggtgaggacagttcacagcacccggcccacgatcacgcccccgtctttccgcagcacatccgcgtgggctgggagcagctgctcaccaccattgcccgcaccatcaacgaggtggagaaccagatcctcacccgcgacgccaagggcatcagccaggagcagatgcaggagttccgggcgtccttcaaccacttcgacaaggtgagcagcctgccacctcctcggcctctcccctcccgccgttgccgtaccagcccacaccttcgtctctgcatctgttcgtccattcccatcacagttgctgagcgtcggccgccactcccagggccagcagggccctgccactgtcagggtgtaggtgtgcggcaccaagaccccagcctgggccacttcacacgcacaggcagggggccggaggtcccaagtcctgccttctggggtggcatcctcaccacccccagggcagatgaagtctcagcacacccaggctttgcgacccggtctgtgaacctggacacagacaccccgcacagtgcttttagaattcagatttggtccggcagcctcatcagaggggccctgagcgccagagtttgctgccatccccagcccacccctgccgggctgacggactgagaagtgtgcagcctcagctctgcacctggcgcccccaggacaggatacagtcccctctgtcccactccaaatcccaaaggcaaggagaaccccccccccgaccctccaccagtcctgggacttgtcctcagttctgtagcatccagctgccacccctgctgtgggcagagaggtcggggaggcctctgccttcctttgagcttccgaggttggggaaaggatgaaaggggcccgtgccgcccccgaccccacgtgtccctggccatctccttgtccatgttgcctctaactctgtgtttccctcccctacgtgtcccttccccctgccctctgcatgtgaccccgatccctcatcctggtctccacgccgcccctcccgcacacctgccttcggatggccccggcaggatcatggcggggcgctggggcccgaggagttcaaggcctgcctcatcagcctgggctacgacgtggagaacgaccggcaggtactgcaccctgggccccagcggaccatggcattaactgctctctctctctctctccttctctctttctcccctcgccatcccacccctgccatcctgtgtgccatctcatggctctcttgcctccctgcccacatctccctggaccccttcccttttacctggtctcttggggccgctgtctccctgctccccgccactgtcctgtctgcctgctgtgcacatggggcggcccctcttgcctactctgggcccggcctcctctgctatgcctgcgtcctcggagcagaagcagacaggcagcatggactccgatgacttcagggctctgcttatctccacaggatacagcctggtatgcagctctgtctccccagccacccgctcctcctcctcctcctcctcctcctcctcctcctcctcccccccacctctccccctcaccgcctccagagcttcctcgtcctcggggacactcctccgcccgagcagcgcagccgtgcctgcctcttcctctgctgcatctgccggggtggggtccctccgatgacttcccgagccccccttcttccctagaagtctccagaaagagggggcagctctcccactctctcccctttttctttctctttctctctttcttccccatcctccagagcttactcgtgagcctgggctgagggcagtagaccccagttccctgctgtgggagaccacgagaggggagggtgcagagaggccctgcttcccggcctggggcactgggggcttggaggcctgggtcagctggagcagtggcaggctctgcccggggccaaggctgctggagcaggcggggaacagggcgcacgcacacgtgggttgggccctactctctcggctgtttccctggagaccccaccagtgtgggcctggctgcccctgccccactaaatgtcgggtgtcccccaccccaccctctccttgcagggtgaggccgagttcaaccgcatcatgagcctggtcgaccccaaccatagcggccttgtgaccttccaagccttcatcgacttcatgtcgcgggagaccaccgacacggacacggctgaccaggtcatcgcttccttcaaggtcttagcaggggacaaggtgagcgagacccctacgaggtgcatgggggctggcgagaggggtccctgcagtgggaggggctgagggggccagtgtgtgggtggggatggctcagagtcccatcctgcctgccccagaacttcatcacagctgaggagctgcggagagagctgccccccgaccaggccgagtactgcatcgcccgcatggcgccataccagggccctgacgccgtgcccggtgccctcgactacaagtccttctccacggccttgtatggcgagagcgacctgtgaggccccagagacctgacccaacacccccgacggcctccaggaggggcctgggcagccccacagtcccattcctccactctgtatctatgcaaagcactctctgcagtcctccggggtgggtgggtgggcagggaggggctggggcaggctctctcctctctctctttgtgggttggccaggaggttcccccgaccaggttggggagacttggggccagcgcttctggtctggtaaatatgtatgatgtgttgtgcttttttaaccaaggaggggccagtggattcccacagcacaaccggtcccttccatgccctgggatgcctcaccacacccaggtctcttcctttgctctgaggtcccttcaaggcctccccaatccaggccaaagccccatgtgccttgtccaggaactgcctgggccatgcgaggggccagcagagggcgccaccaccacctgacggctggggacccacccagcccctctcccctctctgctccagactcacttgccattgccaggagatggccccaacaagcaccccgcttttgcagcagaggagctgagttggcagaccgggcccccctgaaccgcaccccatcccaccagccccggccttgctttgtctggcctcacgtgtctcagattttctaagaaccaaaaaaaaaaaaggaaaaaaaacacaaaacaacaaaaaccaaaaaaaaaaaaaatcacaaaaacaaaaaaactataaaaaagaaagaattaaaaactttcagagaattactatttactttattaacttacggatttattatataaatatatattcacctagcaacatatctctgccgtctctcctgctctcataatgaagacatagccgattctctgcccgggccccttgctgatgctcctccgggtctgcgtcgggcgtgggtctctggggaccctccagaggtggaggtgggctgatggcctggctgcctggtggttgatggttttgctccccctaccttttttttttgagtttattctgattgattttttttcttggtttctggataaaccaccctctggggacaggataataaaacatgtaatatttttaagaaggattcctgcagcatcatctttttttatttctcctgtgtctgtcctccaccttctaggagagccagggcagagctagcactgtcttaagctgtcaacgtggactagctcgtgtcatctgctcgagaagggctgtcgctgttcttgtttctgagtgaggagtacgcaggccagagtggtcacccggccgtgagcagtgagggccagagactagccccagacaggtggatgccagagagagtggcacccatgccaggcaaggcctagggaggtggtcttgctcagcaaccctgccctgagcagcaggtgcgcccatccggagatcctaggagaaggtggccacctccatccactaaggaagagaaggaagacagtggcttgaggcagggagctcgcaggacagagcctgagccaccctgtccctcccacctggctcacctgtctgtgggtcaggcagatgaccccctcacccccatccaggtgctggctgcagtggcctgtgcagagaggggcagggtgagtgcccaccagtccccgtaccccttccccccatgccccaccatgccggggtggtactcacagaagatgcaggtgaggtgggccacacaggacacgaaccgctcgaagtccacacgcagacggctatcccggtagcggctggtgagggtctgggtcagctggttgttcaggtggaagcctagggggaggctgcttctgagcccagtggcccacagggaacccaccttggcattgcatccccaccccacctcctcagggaggacatgaatgccacagggtgtcacaccccaactctgccccatcccggcagggtgagtacaggctgatcccttcaatcctctgggcctgtttcctcatccatcaaacggactaagacagccccgaccccatagggtgtgtgaagacagaacgctcaggacagcgtctgacacgtgactcgatgtgtgggtactgttactccttaaatcctgtggggctttctccttgccagtgggcactggaggatatttctgtgcagcaaaaaatatagtcaatcccatatggagtcagtttccttacagtctacctcagaggcgatttctaaagctgagaaaccatgtctgctgtggagtctcattggaggcttttaaaaacccaaaacaatgggttcttgaccccttctgagatgcaaggttgtgcctgatgacctttgtctcccacacggccagacaaacccagttccaagtaccgtttcatgggcttctgctgcttccaaagcccatcttcacccccattctgtgtgttcattctcttcacaaatatctaccaagtaagtgccatttcatgctgtgcccagtgccaggtgctgttttaacaggagggcaggtggcctgcagcctcttcctgcccgtgtgacctgccccaggtcactccctctggcattcatctgccctcgggcataggggtggaggctgccatgcccagggctatggggaaacccagccagatggggtggaaggacccgagaaggcgctggagcccctcagctgccactgcaggagttcccgtttgagaaattctcaagggcactttatcagtttccttcttcctggaataactcctggcatgtaacaggcactcactggtgccagatgcgtgaacacaagcctgccacctgccacctgctgtgagtccttgctccctcacctccactcctgtctatctccggcccagcctctccctctctgccccacgtctcccaatccttggctgtctctgaccccatttctccccctttgacttgggctttttcttttttcttttttgagacggagtctcgctctgttgcccaggctggagtacaatggcatgatcttggctcactgcaacctccacctcccgggttcaagagattctcctgtctcagcctcccaagtagctgggattacaggcacgcaccaccacgcctggctaatttttgtagttttagtagagacgggggttccgccatgttgcccaggctggtcttgaactcctaggctcaagcaatctggcaatctgcctgccttagcctcccaaagtgctggcattacaggcgtgagccaccacgcccggctggctcttttggacacttgaccaccttctctgggtctcacactcacagccacacccaaaccctctccctctggctctccgactccatcacagtcaccccagcccccatctccctgtggctccatctgctgtgtggtggcagacaggccccagagtggggttggggatctgggaactccaagttctgaccccagcccactctccaaatcccctccacatgagggtcacagtgctgtactgtctcatctgccttggagcccatggaaagcctttctctctggctctctttcttggttaggatgttgtgctgggcttgttccagctcatcaggaggaactcagcctagtagcagaggccattggccggctctctttggggcttttggtaatgaaagctgcattctccaatcactaagtgctatgccctgcagtgcatggacgactcctcaccaccctgtgtactagctttttttttttttttttgagaggcaggctcttgctctgtcacccaggcacaatcacggctcactgcagcctcagcctcccgggctcaagccatcctcaagcctcagcctcctgagtagctgggaccataggtgtgagccaccacaccaggccctggccattttagagaggaaaatggaggctcaaagagatgaagtcaagtgcccagggcccctcctggagtcagtagagtgaggattccaaccccggtgcaccagaatccagaacattctaccatgctgccctgggggccagaccctctcagataccagctcctaatcttccccttcctggaggggcctctccctgccccagaacccctaccaggcacatccccctttcatgtcctccccaccccacacacgccccttgcccttctccttccttatttggcctctttcagggtcacccaacccctgccagggactggcaacaagctaaggtgtgggcctgtggatggccacagtgcagacggccacagctgagcagggggacttggagacaatgggatgggagagaacaggtcctgtccccacgaccaccccaggaccctgtccacacctgctgcattcagtgccagcctcagctcgtaggagttcatggttccagaggtgtcctcatcgaacttgttaaatatggcctgggcaggaaggatgagtcagggctgccctccatgccctgaagagggctgccaatggggcctcccaggcaagacagcctggtgcccatcccaactccctttcttctggtgtggacccccagcaagcagcctagccacttgggacttctgtttcccaatctgtaaaatgggaataagagcaatgacccagaggacaagctgaggctgggtgggggcagggatatcccagccagatctctccaagtcagcctagtccagtaccccctcgttccctggggacctgatagcccacagggtgcctatgtctctgttagtaaaggtttctctctttctgggaagaggcccagtctcccacctcacctgccactccaggaggtagccccagagctgctggaagtggtgtaaggccaggctttgcccatgctgtgttgggggtcgggggcatctggttaaggtcaatctctccagaaggggaggagagaccccaacgtccccttccccactccctccctcacccaggcactgccccccatgtaccccgaaacactgcagcagctgctcacaggtcctgagcccgatctctctgggggtggaggtatgggccctggctacaggaaaaacaaagtcaaaccacagcacttcctgcattctggccaccactttaagggctgggtggatgtgactcccttaagcaggtgatgttgtcagtcccatattatagaagccgaggcacagggagccagtgactgctgcgcctagcagagctgggattcaaatccaggcagggggtgcccagtctgtgctcaaggcagccttgcctttcagcggaaggggagcttgcgagcagccgtggcccaggtcacggggcccacacaagatcccctgcagggagatgctgccaggctgagccctggcttcctgagcccaactcccagcagcgcggtgggttcatagacatagggtggcaccggctctggttgcaggacccctggctaagacccctcctcctgcccctatcccagccaactcaccaggctccagggcaatgcttagtaaggcctggagctgagaggcattgagttcttcctcctagtccaggaaagagggcttgtgaggccatttactcatccagctgctctgggccaagccctgtgctagggacacggcaggggctgacagagcctcagagccctagctccaggagtgggggagacagacctgtccccacagggccagggctgtgacgggggaagcactgggctgtggttgctggtggggggccagcagaccggcctggggcaggggggtggtcagggagagcttccagggctgggcaccttagatgagacctgagcctggctggaggtgtcaggagggagagggtggtcctgggagagggtatggactgagcccaaggccctgaggcagggaggagctgtgagcatttcaagaaaaggtcaggagatttaagcccggagggaggaaaaagcaagcaaaatgagacacctgagatgctggggtgggggaaggggggtccccaaggggaggccgcagcgggataccccctcagtccaatccccctcctcacctctccagccagctcctgaaacagctgctccaaccccagctccaggggcaggtaggggccctgccgcatggcggaagtttagcgctggccaagatccccgccccatgccgcccctccaggaacagtccccacctggagagactgcaggtctgcgctgatcacgtcgtcgatctccctgcaaattacagatgggaagtggggagggggctgtttgccccagctggggctgtgtgggacggggtctcaggtgaggaatcgcgtggggtctaggtagggaccgtggagccctgggctcatcctcgcggggcgggggttctgggggcggggcgggggttctgggggcggggcgggggttctgggggcggggcgggggttctgggggcggggcgggggttctgggggcggggcggggcgggggttctgggggcggggcggggcgggggttctgggggcggggcgggggttctgggggcggggcggggcggggcggtggttctgcgggcggggcggggcggggcggggcggggcgggggttctgggggcggggcggggcggggcgggggttctgggggcggggcggggcgggggttctgggggcggggcggggcggggcaggggttctgggggcggggcaggtcaggtctcgggggtctcgggggtctcgggggtctcgggggtctcgggggtctcggggcctgtctaggcagggatggggtcggatttgggtgcccggggctcacacggccgtgtggcggcgctcggagaagacacgcagagtgaagtcagcctcgtcgccggcgtgggcggtgctcggcaccaccaggtagtggcctggacgcaggcagcagcggcgggtcacgtcgcggcgggcgctgaggggcgagcggtcggcgcgcagcagccggggcaggagcgcatggctgcgcggggaatcccagaggcccagcagctggggacggggcggcatgaccacggaccaggctcacccccggcccttcatccccgcaccctccagcgcgccccgtccaccctgcctaacccctgtccacgcctcccctgcccccggacccggctctgcccccccacccccagggcagtttgaccaagccccagggcaggttgaccaagccccagggcaggttgaccaagccccagggccggttgaccccatcccagactcacctcctctggaatctgaaagaagcaagagcaaggggcgtcggggcaggggagaggtggccgccgctcagggtctcctccctgccccttctcacctctgtgctctctccctccttcttcgtcctattagacccttattgaacctttgccccgcagtccccgacccaggccctcgccgacccctccccaactcttccttccccatctgcgctcccagcgccttctctgtatccttggtcccctctggcccttctaacccccagcctctctctgtccctaacctcgtccctctgtctgtccctgagcccctccctctcattcccttagctccctctcccctctgagacctggccccccagccctactagccccctactcccctcccagcgccgccccctcttggccctgctcctccactcctcccctcctccccgatcctcttcagtcccacccctccaccactccccctcttcccccttggccccgccctccacacctcccctcttcccactggccccgcccctccatgcctcccccgctccttggcccggccccgcccctccaccctccgggttccctccagcctcagctttgcccaggacctcacctggaacacgtggaagccaacggtgaggtaagtgaggcccttggctctcaggcgccgccggttgcgctggatgagggacagaaggaccgtgcacttgggcgtgcggcccccccgcgctgggccccgtgcccctgcagccccccagcccccccagggcccttcctcatcctcgtcatcctcctcatcaggctccagcagcgttaaacggaactgaggattggtccagaaggtttctaagggaggaggaaaaaagggggtttcctagccggccacagcgccccccaccccaggaagcctctcagggcccctcaggcctcaccagcattaggctggctcccgccggagttgaagccacgcacccagcggccttggaaggtgtggacgtgccagccgcccccctccgggctggggcccagcacctccgggctcagcgagcagatctgcacggtgtcgaaatggaggaggaagtcccgcagctccatcctgcacggtggcccagtcagaccctgcccggccccacctcgagggggtcccaagatcccggaaatgactcccagatcccaaagcccctcacatttcttaaatattgtcaaatacccttcaggctccagaaatgaaccccaaatgcctgggcctctagctctgccaaattcctccaagtcctcagacatgccccacaaatcgccaagattcacaagctgcccccaaatatcgttaaattgccaccaacccccaaatagcaagaccctcagactctaaattaccaacaagtacccttcagcccctcaacattgccaaatctcaagaaatgccccaaatatcaccaagccttcctccattgccctaaatactgcccatccctttcaatcctccacagataactaggccttcaaattcccctcatattactacttttttaaacccactccaatcagaggttctctaatattactaccaattcttccttgatttcccaaaatagaacctggccccaaaattaccaccgatgtacacagtttctccctattaggacccatccttcaactggggctcgccctccctgaaccccttggcagagaccctcccagaggcagagctgggaccctgacgaactgaccagaactcgccatcctcctttttcaccagcagggcatcgcggcactcggtggggagtgtgtcccagcgtgggcagctggagagactgtggtgtgaggggcgggcaggtggggtccagccccacacccaccccagacccatcccacctgtcgctccaggcccccgtccactccacgcagccccatgggttccgcagccgcagcagccgcaccttggtgaagcccaggaacacctggggcagcatcgtcagtgggggtgatgcctggacatggcctgccaccccacccatgggggacacttaccttgtgtgtgcccgtgatggaatacgcgtgtccctttaccaggccctcttctgtgcggtactcaccccgatcactctgggcaggggatgggatggtgaggccaaggtaggggacaggagggcagctgctcctccctgcccccaacctcctgccaccaaggcaggagccaaccagagcactgaactgaatggcacgcagctcagagaccatgtcagggttagtgactgaaggcgaaagagaaaaggagaggaagggagatggaaacgagacaaaaggagatggaggtacgggctcacgcctgtaatcccagcacttagggaggtcgaggtggaaggactacttgaggccaggagtccaagaccagcctgggcaacatagcaagaccccaagtctacaaaaattttaaaaattcaacaggcgtggtggtgcacaccagtggtcccagctactctggaggctgaggcaggaggatcccttgagcccagaggtcaaggctatagtgagctatgatgacactactgcactctggcctgggtgacagagtgagatgagaccctgcctccaaaaacaaaaacaaacaaaatagatggaaagaggcctgttgtggtggctcacacctgtaatcccagcactttgggaggccgaggcgggcagatcacaaggtcaggagattgagaccatcctggctaacacagtgaaaccccatctctactaaaaatacaaaaaactagctgggcatggtggcgggcgcctgtagtcccagctactcgggaggcaaagcaggagaattgcttgaacttgggtgacagaggttacagtgagccaaggtcgtgccactgcactccagcctgggtgacagagcaagattccgtctcaaaaaaaaaaaaaaaaaaaaaaaagatggaaagagtagagagacagagacagagacaaagaaagatacagaagagagaaacagacacaaaagaaaaagagaagcagtaactcagaggatttaagtaaatgaatgagtgaaggagttagaccaactcagtgaatgaatgagtgtgtcatggggtcacagatgaacacatgacccaagctaagcccacgagaatcaatcctgggacttttactgaaattctcagaaagaggcactttttttttttttttttaaataaaccctagggtggtaggagatacctgcagctatgggggatccttttatgcccatgaggggagagcctggctgagagtgacactaacacagaatgagaaataaacatagttgcaacaccctcagcatctggatccagctgtgcctgaagcccctgattcatgagagcaaatgaatttatttttgactagttagatttatgagcgagcctaagccagtaacggaagcagagaacagaggaagcactccgcccaccccaccacacccctgactgtgctctggtcctggtgggggttccgcatgcgagtccaggtctcttaccagggcagtggcgcccacgagggactccttggccagggcatggcgcagggcagagaacagccccatgctgttttgtctcagatagagcacctcgcccacgccgcctgtgaaatccacaaaagcctcattcatgtggccgccccgcatcacctcataggagccgtggagcctgtgggggcagatctggggtgagggttgaggcaagtacaagcgtctcaggcacccctgccctgggatctgcaggggcctgtgtctcagggtgtggaatccccaggggaaattcctgaagttttgagactttttccagggtcaccctgtggcccaggccggagtgcagtggcgtgatctcatctcactgtagcctcaaactcccgggttcaagcgatcctcctcccacctcagcctcccgaggagctgggcccacaggtgcacaccaccacacccagctaaaacaatttcagactcttggccaggcatggtggctcacgcctgtaatcccagcgctttgggaagccgaggcaagtggatcacctgaggtcaggagtttgagaccagcctggccaatacggtgaaaccccgtctctactaaaaatacaaaaattagctgggcgtggtggcacatgcctgtaatcccagctactcgggaggctgaggcaggagaatcgcttgaactcgggaggcgaaggttgcagtgagccaagatcacgccattgcactgtagcctgggcaacaagagtgaaactccatctcaaaaaaaaaaaaaaaattcagactcttgacggggggaactgtggcacatacagaagcccttggagattgggcctgtggtccttggggtgaccaggacttcggtttggtggggggcatgggagagctgtgttagaattctgagagtcctggtgctgtctgaaaccttgaacctctggtagatgtccgctttgggggatcatccctatgggggcttgtcaggaatttcagagcctcagaatggggaaaaggcaaagatttgagggtcccagggtgacccccaatattttgggggtgctttagatttctcaatggaccaggagagacaatctaagatatacagctcacccgaggggataaatcccagatttggtgaatccagggcctgatatatgagatttcaggatccttaagaattatgagtgactgggggtctccaggaatgttttgtgtgaaatattgatggagagaggggtttaagatttgaaggtacagctgagcacagtggctcacacctgtaatcccagtactttgggaggccaaggaaggtggatcacctgagatcaggagttggagaccagcctgaccaacatggtgaaaccccatctctactaaaaatataaaaattagccaggcatggtggtgcgctcctgtaatcccagctagtcgggaggctgagacaggagaatcgctggaacctgggaggcagaggttgcagtgagccaagatcgcgctactgcactccagcctgggcgacagagtgagtgagactccgtctcaaaaaaaaagaaaaaaaaaaaaaacatgaagttgctcaggtgatgttgtgatatgagggttctggcggttgtcacttggtttgggattcttggtggggtgtttggaggattgcagagcttgggggactctgggtccccctgtggcttgatgcctgctgtggggacttagggctgcagctggttggaactggggtcctcacttggcgtaggccttctccaggagtggggcccagaactcattccgctgttccgagcgcacgaacatcagcttcccctcacgcacgggcagcctgtcatccaccacgacgtccatccagcggccaaactgccagagctggtgggagaagatgcagggccggactcggcttccaacctccaaccctgcctgggccctgcctctgctgtgccagtcccagagtcaggaattacagccccaagtcaacgttaactatgaaatccatatggctggccgggtgcggtggctcacatctgtaatcccagcactttgggaggccgaggcggatggatcacgaggtcaggaattcgagaccagcctggctaagatggtgaaataccatctctactaaaaataagaaaaaattagctgggcatgatggcgggtgcctgtaatcccagctactcaggaggctgaggcagagaattgcttgaacctgggggcggggcgaaggttgcagtgagccgagattgtgccactgcactccagcctggatgacagagtgagattccatctcaaaaaaaaaaaaaaagaaaaatccatatcaccaagtcaccatgggggaaacggaggcatgggcagaggaactgagctgtacctggaagtggaagacgcctgcgtagccatgctggaaatcctgtccaggagggaccacccggcgcaggagccggggatacagagtaagggaggcggcagctgcaaggaaccagcagttacctgggaggagaggccaggattaggtgaggatggaaggagggaggcctggtgcggtggctcatgcctctaatcccagcactttgggaggccaaggcagaaagatcacgtgagcctaggagttcaagaccagcctggccaacatggcaagactccactacaagaaaatttaaaaattagctgggcatggtggcatgcacctgtagtcccagctacttgggaggctgaggcaggaagattgcttgagtccaggaggttaaggctgcagtgagctatgatggtgccactgtattccagaatgggtgacagagtgagaccccatctcaaaaaaaaaaaaaaaaaaaaaaggaaggaaggaaggagggaggagggagagagaggcctagggagagaagagactgaggagggatccaggggccgggagtgggtggacaaagggatggagctgtcaggatctcagctgaaactagctggatctgaggactccaggtgggttcagggtctcacccaggctcccctgacacacgtctgtgcggctcatgtcttcacagatgaacttcggctcagcacagaactcctgtgggtggtgggggattccaggcctcagcctgagaaagcgaggaaaggtctcatccagaggagtgagggcctccaagcccatgaaaggcctggaagcctgtgggcaggagcatggcttccctgggtctccagaagttgtgctgagccagtcccatggtagccccctcctccctcagacccgggagtccaggcccagcccctcctccctcagacccaggagtccatgtcccgagcccctcctccctcagacccaggagtccaggcccagcccctcctccctcagacccaggagtccaggtcccgagcccctcctccctcagacccaggagtccaggcccagcccctcctccctcagacccaggagtccaggtcccgagcccctcctccctcagacccaagaatccaggtccccagcccctcctccctcagacccaggagtccaggtccagcccctcctccctcagaccccggagtccaggtccccagccccctcttccctcagacccaggtgtccaggccttggcctctcctccctcagatccagaagtccaggtccaagccccctcctccctcagacccaggagtccaggtccccagcccctcctccctcagacccaagagtccaggcccagcccttcctccctcagacccaggagtccaggcccagcccctcctccctcagacctaagagtccaggtctcgagcccctcctccctcagaccagggagtccaggcccccagccttccttcctcagacccaggagtccatgcctccagcccctcctccctcagaccccagagcccagaccccagccacactttacatggggcctcatccatttcacgcctttggccttctccgagtccggccccagctggtcatagccaagggcatcagggccagcagggaagtaagggtcgcggaacaggatccccgaatccaggcaggctgcccgaattgcctcatagctctggccccgaaaaagctgcaggcgcccggctccgaccccagcctcctcatccacgagctggatggtgaccctcccactgctggatgccatctggacactggcctcacaagccggcaccaggccctttaacctcctgagtcacgggggcggggcctctcttccattggagccccagtggggtctttaggcaatgaggagccttccctcgttaatattaattgatggtttggggtgctggggagcagggacgcctcttcagtagctttcttcccagggcgtggggccttcagttgtggccaaggtagcagcttaatgggcttggccagcagcaggagagaaggcgggcagagctgagggaggaccggctgccgctgtcagagcaccaagaaggaggtcagtgtgggggtgagcttctgcctacttatgcctgtggggctggggaaggaggcgggtttacctcggtgtctctatctctcagactgcctctctccccctccctctgacagtttctctctccccgccttcatgtttcttctccatcagtttctggagtgcagtggcacgatctcagctcactgcaacctccgccttctaggttcaagtgattctcctgcctcagcctcccaagtagctgggattacaggctcgtgtcaccatgcccagctaatttttgtattttttgttagagaagggattttaccatgttgaccaggctggtcttgaactcctggcctcaagcaatccgcccaccttggcctcccaaagtgctgggattacagacgtgagccactgtgcctggtcaggttttgttaattaaaaaaaattttttttaaagtagagacagaggggtggcggggggcggtcccatatgttccccaggctggtcttgaactgctggcctcaagtgatcctcctgcttcagcagcctcccagagagctgggattacagatgtgagctactgtgcctggccctttcttgttttttgtttctggcaatatttgtgtctctgtatttccccaactccacccctctccccaccccaccctctttttttttttttttttttttttgtagagatggggcggggatctcactttgttgcccagactggtctcgaactcctgggctcaagtgatcctccccgcttggcctcccaaagtgttgggattacaggcgtgaatcactatgcctgtcccctctctctttgtgtctctttcagcgtgtgtctgttcctctctgtacctgtcagacccaggagtccaggcccccagcccctcctccttcagaccctgtcagtgtaccttgtgtctgcctccctgtctcttcctctccatctttctgtctgtccctgtaacccatatgtggctcctccatcatccaccgagggaccctgagctcccctccgctcacgccccctaagccctcaggatgcgcctcctcccctcccggacaaggtagactcagcctgcttgcccagggaggctgaccctggagggatggctctgtacctctcctgtgctgggagccatctggtgaccatgatgccctgccctggcccacgccactcagagtctggatggagcagtatttcccccaaaggactctggagccattggaggaaatgggagaaacaggtacggagatgccagagcctcagcagtgctggtcccagcagaccttccaccctcgttgagggtgtctgctgccctcccagagccttgtcacctccacgccactcagatgtccctcaagccttttggccttcttccctccaagtggacccacaaatattgtccaagccacccacgtacacggctaccaaaagtgggttacaaaacaggctttctggctgggcgtggtggctcatgcctgtaatcccagcactttgggaggccgaggcaggcagatcacctgaggtcaggagttcgagaccagccaggccaatgtagtgaaactccgtctctactaaaatacaaaaattagccggacatagttgcgggcacctgtaatcccagctactcagaaggctgaggcaggagaaccgcttgaatctgggaggcggaggttgcagtgagccgagattgtgccactgcactccagcctgggcaacagggcaagactgcatctcaaaaaaccccccaaaacagggccgggcatggtggctcatgcccgtaatcccagcactttgggaggctgaggtgggcagaacacttgaggccaggagttcaagaccagcctggccaacatggtgaaacaccatctctattaaaaatacaaaaattaggctggacgcggtagtttactacgcctgtaatcccagcactttgggaggccgagacgggcgggtcaggagttccagaccagcctggccaacatggtgaaaccccatctctactaaaaaatacaaaaaaattagctgggtgtggtggcacgcacctgtaatcccagctactcaggaggctgaggtaggagaatcgcttgaacccgagaggtggaggtttcagtgagccaagactgcaccactgcactccagcctcggcaagagagcaaaactccatctcaaaaaaaaaaaaaaaaaggccgggcacggtggctcaagcctgtaatcccagcagcactttgggaggccaaagcaggcagatcacgaggtcaggagatcaagaccatcctggctaacacggtgaaaccccatctctactacaaaaaatacaaaaaattagccaggcatggtggcggccacctgtagtcccagctactcgggaggctgaggcaggagaatgacgtggacccaggaggcgaagcttgcagtgagccgccactgcactccagcctggttgacagagcaagactctgtctcaaaaaaaaaaaaaaaaaaaaaaattagctgggcatggtggtacacacctgtaatcccagctactcaggagggtgaggcaggagaatcgcttgaacctgggaggcggaggttgcagtgagccaagatcacgccactgcactccagcctgggtgagagagtgagactccatctcaaaaaaaaaaaaaaaaaagttttcttcgtgtaggattgccaagcccaccccagccccacgggagtcatatgggagtgcttccagcctgccgggattaggagccacagcacctggggtccaatcccagctctgccacctacacctgtgtgtctttgggcacatcacttaacttctctgtgcttcagtttcctcatctctgcaatgcggatgatgatagggcgtacctcggagggttgctgtgggaagcgaatgagttcgtacgtgggatgagttcagagaagtgcctgacacagagtcgctgctcactgcacgaggcattgaccatgccttggcgttcaagagtgtctgctgccctcccagagccttgtcacctccatgccactcagatgtccctcaagccttctggcctccttccctccaagtggacccacagatattgtccaagctgcctacgtacatggctaccaaaagtgggttacaaaacgagctttctggctgggcgtggtgggtcacgcctgtaatcccagcactttgggaggccgaggtgggcggcctcggccatccacagtcaacctgtctccttggatctgggctgctgtttctttcacttgtttgttggtttattttttgggacagtctcgcctcgtcacccaggctggagtgcagtggcgtgatcttggctcactacaacctccgcctcccaggttcaagtgattctcctgcctcagcctcccgagtagctagaattacaggcatgtgccaccacggctggctaatttttgtatttttagtagagacagggtttcaccatattggtcaggctggtcttgaaagcctcacttcaggtgatccacccgccttggcctccaaaagtgctgggattacagacaggagccaccgcgccatgtcttactgtttctttttttgtattgttttgttttgtttctgagacagggtctgactctgttgcccaggctggagtgcagtggcacaatcttggctcactgcagccttgacctcccgggctcaagcaatcctcctgcctcagcttcctgagtagctgggaccacaggcttgtgccaccatacccagcaaatttttagactttttggtggaatggagtctcactttgttgccagggctggtcttgaatccctgagctcaagcaaacttcccatgtcagcttcccaaagtgctaggattataggcctgacccactgcacctggccagatgtacaactttcaaaccactgaagtagcttaaaatgaaaggaaaagaaaatgtaatctatttggcaatggtcgaaaagcaaaggaaaatgcagcgaatcatagaaaataaaagcaaaaagcatcacacaatgacctaaataaaaccaagcatatcagttataacaacattatgcaaatgtgtgaaacgtacttgggaacatcaacaaacaaaattcaactgtttagctttcaaaacactttccaaagataacaccaccaagttttaaaataaaaggattagaaatagctatcagtcaaaagcagatacacaaaaatcagggcaaatctgatattagagaaaaccggatttaaagcagatagcattactttggacaaaaggagttattttctattgataaagtgtatgatccagaatgaaaagtgattggatgggtgcagtggctcatgcctgcaatcccagcactttggaaggctgaggcaggtggatcacttgaggtcggcagtttgagaccagcctggccgacatggtgaaaccccgtctctattaaaaatacaaaaattagctgggcatagtggtgcatgcctgtaatctcagctactcgggaggctaaggctcaagaatcacttgaacccaggaggtggaggttgcagtgagcccagattgtgccagtgcactccagcctgggtgacaggacaagactctgtctaaaaaaaaaaaaaaaaaggctgggagcgatggctcacgcctgtaatctcagcagtttgggaggcccaggcagacggattactcaaggtcaggagttcaaaactagcctggccaacatggtgaaacctggctccactaaaaatacaaaaagccaggtgtggtgtgtgcctgtaatcccagctactcacgaggctgaggcaggagaatcacttgaacctgggaggcagaggttgcagtgagacactgcactccagcctgggtgacagtgtgagactccatctcaaaaaaaaaaaaaagtgatcatttattacactattagaaacaaaaggaaaaatacacagaaacacagtagtggtcatgggtaatttgaaaccaccattattcttcaaatatcaagtcttttaaaatgtgatattttgaataatagaatacagtgaatttaatatatatgcacactcattacatctatatacactcatgattttcaagcatatatcaaacatttgcaaagactcaatttaaaaaataaaaggccgagcacggtggctcacgtctgtaatcccagcactttgggaagccgaagcgggcagatcacctgaggtcaggagttcgagaccagcctggctaacatggtgaaaccccgtttctactaaaaatacaaaaattagccgggcatggtggcaggcacctgtagtcccagctacttgggaggctgatacaggagaatcacttgaacttaggaggcagaggttgcagtgagccgagatcgcaccactacactccagcctgggcaacagaacaagactctgtctcaaaaataaaaaggctgggtgaggtggctcacgcctgtaatcccagcactttggcaggctgaggtgggcggatcacaaggtcaggagatccagacaatcctggctaacacagtgaaaccccatctctactaaaaatacaaaaattagctgggcatggtggcgtgtgcctgtagtcccagctgctggggagactgaggcaggagaatggtgtgaacccaggaggcggagcttgcagtgagccaagattgcgccactgcactccagactgggcaacagagcgagactccatctcaaaaaaaagaaaaaagaaaagcgcctctgagaccagctgaataacatcaagcaaacaaacatatgtataataggactctggggaaaggagaggaaggagaaaaatttttgaagcattaatggctggaaacttttcaaacttggtgtaaacgttaatttacacaaactccaagaagtataaatacaaagagagccatatctagattcatcgtagtaaatgtcaggcctttgagcttaagctaagctatcattatcttttgtgacttgcacatacacatctagatggccggttcctgccttaactgatgacattccaccacaaaagaagaacccctcaaccccttctccttcaccgttagtggcaagtcccgcttttctgggggaggggcaagtaccccaaccccttctctccgtgtctctaccccttctctgcttttctgagtggcaagaacccctcaaccccttctccttcacccttagtagcaagtcccgcttttctggaggagggacaggaaccccgacctcttatctctgcaccccgatcccttatttccatgcccagacctcttatctctgtgccccatcccttatttctgcaccccaacctcttatctctgtgccccaaccccttctctgcttttctggagggcaagaacccccccaccccttctccatgtctctactctcttttctctgggcttgcctccttcactatgggcaagcttccaccttccattcctccttctcccttagcctgtgttcttaagatcttaaaacctcttcaactctcacctgatgtaaaatctaagcatctaattttcttctgaaacgccgcttgacccccatacaaacttgacagtagttccaaatagccagaaaacagcactttcaatttttccatcctacaagatctaaataattcttatcataaaataggcaaatggtgtgaggtgcctgacatccaggcattcttttacacatcaggctctccctagcctctgttcccaatgcaactcgtcccaaatcttccttctttccctcccacctgtcccctcagtcccaaccccaagtgtcactgagtctttctaatcttccttttctacagacctatctgacctctcccctccttgctaggctgagctaggtcccaattcttcctcagcctccgctcctccaccctataatccttttatcgcctcccctcctcacacccggtcccccttacagtttcgttccgtgactagcccttccccacctgcccagcaatttactcttaaaaaggtggctggagctaaaggcatagtcaaggttaatgctccttttcctttatcccaaatcagatagtgtttaggctctttttcatcaaatataaaaatccagcccagttcatggctcgttcggcagcaaccctgagacactttacagccctagaccctaaaatgtcaaaaggccgtcttattctcaatatacattttattacccaatctgctcccgacattaaataaaactccaaaaattaaattccggccctcaaaccccacaacaggacttaattaacctcgccttcaaggtgtacaataatagaggcagccaagtagcaacatatttctgagttgcaattccttgcctccactgtgagacaaacctcagccacatctccagcacaaaagaacctccaaacgcctaaaccgcagtggccaggcgttcctccagaaccgcctcccccaggagcttgctacaagtgccagaaatctggccaccaggccaaggaatgcccgcagcccaggattcctcctaagccgtgtcccatctgtgcaggaccccactggaaatcggactgtccaactcacctggcagccactcccagagcccctggaactctggcccaaggctctctgactgactccttcccagatcttctcggcttagcagctgaagactgatgctgcccgattgcctcggaagccccgtagaccatcacggacaccaagctttaagtaactctcacagtggaaggtaagtccgtccccttcttaatcaatacggaggctacccactccacattaccttcttttcaaaggcctgtttcccttgcctccataactgtagtgggtattgacagccaggcttctaaacctcttaaaactccccaactctggtgccaacttagacaatattcttttatgcactccttttagttatctccacctgcccagttccctaattaggccgagacacttcaaattatctgcttccctgactattcctggattacagctgcatctcattgccgcccttcttcccaatccaaagcctcctttgcatcctcctcttgtatccccccaccttaacccaaaggtataagatacctctactccctccttggcgaccaatcatgcaccccttaccatctcattaaaatctaatcacccttaccccgctcaatgccaatatcccatcccacagcatgctttgaaaggattaaagcctgttatcactcgcctgttacagcatggccttttaaagcctataaactctccttacaattcccccattttacctgtcctaaaaccagacaagacttacaggttaattcaggatctgcgccttatcaaccaaattgttttgcctatccaccctgtggtgccaaacccatatactctcctatcctcagtacctccctccacaatccattattctgttctggacctcaaacatgctttctttcctattcctttgcacctgtcatcccagcctctctttgctttcacttggactgaccctgacaccaatcaggctcagcaaattacctgggctgtactgcctcaaggcttcacagacagaccccattacttcagtcaagcccaaatttcatcctcatctgttacctatcttggcataattctcataaaaacacacgtgctctccctgctgcttgtgtccgattaatctcccaaacctcgatcccttacaaaacaacaactcctttccttcctaggcatggttagttcggtcagaattattacacaagagccaggcccgcaccctgtagcctttctgcccaaacaacttgaccttactgttttagcctagccctcatgtctccgtgcagcgcgtgccgctgctttaacacttttagaggccctcaaaatcacaaactatgctcaactcactctctacagctctcataatttccaaaatctattttcttcctcacacctgacgcatatactttctgctccctggctccttcagctgtactcactctttgttaagtcccacaatgaccattgttcctggcccggacttcaatccggcctcccacattattccagataccacacctgacccccatgacggcatctctctgatccacctgacattcatcccatttccccacatttccttcttccctgttcctcaccctgatcacgcttgatttattgatggcagttccaccaggcctaatcgccacacaccagcaaaggcaggctatgctatagtacaagccactagcctgcctcttagaacctctcacttcctttccattgtggaaatctatcttcaaagaaataaattctcagtgttccatctgctattctactactcctcatggattattcaagccccctcccttccctacacatcaactcgaggatttgcccccacccaggactggcaaattagctttactcaacatgccccgagtaagataactaaaacacctcttagtctaggtagacactttcactggataagtagagtcctttcctacagggtctgagaaggccaccacagtcatttcttcccttctgtcagacataattcttcagtttagccttatcattcccttctgtcagacgtaattcctcaatttagccttcccacctctatacagtctgataacagaccagcctttatttgtcaaatcagccaagcattttttcaggctcttagtattcagtgacagactaaaacacacctcaccaacctcagccaccaacttaaaaaggactggacaatatttttaccactttcgcttctcagaattcaggcctgtcctcagaatgctacaagatacagcccatttaagttcctgtatagacactcctttttattaggccccagtctcattccagacaccagaccaacttagactgtgcccccaaataacttgtcatccctactatcttctgtctagtcatactcctattcaccgttctcaactactcatgcatgccctgctcttgtttacactgccagtttacacagtttctccaagccatcacagctgatatctcctcgtgctatccccaaactgccactcttaactcttgaagtaaataaataatctttgctggcaaggctatgctgaacctccttaggcactctctaattagatgtcctaggtcctcccaattcttagtcctttaatacctgtttttctccttctcttattccgtttagtttttcaattcatacaaaaccgtatccaggccatcaccaatcattctacacgacaaatgtttcttctaacaaccccacaatatcaccctttaccacaaaatcttccttcagcttaatctctcccactctaagttcccacgccgcccctaataccgctggaagcagccctaagaaacatcacccattatctctccataccacccccaaaaattttcactgtcccaacactttactactatttcattttatttttcttaatataagaagacaggaatgtcaggcctctgagcccaagctaagccatcatatcccctgtgacctgcacgtacacatctagatggccggttcctgccttaactgatgacattccaccacaaaagaagtgaaaatggcctgttcttgccttaactgatgacattgtcttgtcaaattccttctcctggctcatcctggttcaaaagctcccctactgagcatcttgtgacccccactctgccctccagagaacccccctttgactataattttcctttatctacccaaatcctataaaaacagccccgcccttatctcccttcgctgactcttttcagactcagcccgcctgcacccaggtgaaataaacagttttattgcttacacaaagcctgtttggtggtctcttcacacggacgcgagtgaaagtaaaactgctgaaaacaattcaaaaagggcatttttttttttttttgaggcagagtctcactctgtcgcccaggctggagtgcagtggcacaatctcggctcactataagctccatctcccgggttcacaccattctcctgcctcagcctcccgagtagctgggactacaggcacccaccaccacgcctggctaattttctgtatttttagtagagacggggtttcaccgtgttagccaggatgttctcgatctcctgacctcgtgatccaccctccttggcctcccaaagtgctgggattacaggcgtgagccaccgtgccaggaaaatggaaaattttaaaggagcaagtgaaaaacagctcattatgtacaggggaacaatagaattaatggctagattctcctaggaacaatggaggccagaaggcagatgaatgatttattcaaaacactgaaagaaaaataaaactgtcaactgataattctatattcaacaaaactatacttcaaaacaaaaggcaaaagaaaatcattcccagataaacaaaaagagaattcctgactagcatatacctaaacgcagggaatactcaaggaaacccctcacactgaaaatgacagtagacagaaactcaaatccacaggaagaaatgaagagccccagaaatgtatttttcttttcttcttttaatttattttaaaacataaggtcaggctgggcacggtggcccacgcctataatcccagcactttgggaggccgaggcaggcagatcatgaggtcaagagatcgagaccatcctggctaatgtggtgaaaccccgtctctactaaaaatacaaaaaaaattagccgggtgtggtggcgggtgcctgtagtcccagctactcggaaggctgaggcaggagaatggcgtgaacctgggaggcggagcttgcagtgagctgagattgcaccactgcactccaggctgggcgacagagcaagactccatctcaaaaaaaaaaaaaaaaaaagaaaaaaaccatataaggccgggtatggtggctcaaacctgtaatcccagcactttgaggccaaggtgggtggattgcttgagctcaggaattcaagaccagcctgggcaacatggtgaaaccccatctctacccaaaatacaaaaattagccaggcatggtggtgcaaacctatagtccagtcccagctgttcaggaggctgaggtgggtgtattgctggagcctgggaggtcggagctgcagtgagctgtgattgtgccactgcactctggcctgtgtgacagagcaagactctgtctcaaaataaatagacagacaaataaataaaattgtaaaaaatatatatatataaaattgtttaaagtaaaggttatgccaggcacagtggctcatgcctgtaatcccagcactttgggaggccaaggacagtggatcatccgaggtcaggagttaaagaccagcctggccaacatggcaagaccctgtctctactaaaaatataaaaattagctgggaatggtggcaggcacctgtaatcccagccactcgggagactgaggcaggataatcgcttgaacctgggaggcagaggttgcggtgagccaagatcatgccattgcactccagcctgggctacaagagcgaaactccatctaaataaataaataaataaataaataaataaataaaggaaaggttataaggccgggcatggttgcttacgcctgtaatcccagcactttgggaggccgaggcggtggatcatgtgaggtcaggaatatgagaccagcatggtcaacatggtgaaaccctgtctctacaaaaatacaaacttaaccaggcatgatggtggctgcctgtagtccgaggtactcaggaggctgaggcaggagaatggcttgaacccaggtggtggaggttgcagtgagccaagatcacgccattgcactccagcctgggcgacagagcaagactccatctcaaataaataaaaataaataaataaaatacaaaaaattagctgggtgtgatggtgcacgcgtttagtcccagctactcaggaggctgagacagcagaatggcttgaacctgaaaggtggaggttgcagtgagctgagatcatgccattgcgctccagagcgagactctgtctcaaaaacaacaacaacaaaaaaacgcgaggcacagtggctcacgcctgtaatcccagcaccttgggaggctgaggtgggggggatcacctgaggtcagttcaagaccagcctggccaacatggaaaccccatctctactaaaaatacaaaaattagccgggcatggtggcgggtgcctgtaatcccagctacttgggaggctgaggcaggagaatcactttaacccaggaagcagaggttgcagtgagccaagatcgcgccactgcactccagcctgggtggcagactgagactccatctcaaaaaaaaaaaaaaaaaaaaacccagttatatagcactgtatttttttagagacatgatcttgctctgtcactcaggttggagtgcagtggcatgatcataacccattgtaacctcagactcccagtctcaagcaatccccctgcctcatcctccctagtagctgggaccacaggtatacaccaccacacctggataatttttgatttttttttttttttgtagagacagggtctcactatgttgcccaggctggtctcaaactcctggcctctagcaatcatcccacctcggcctcccaaaatgctgggattccaggcgtgagccaccacacctggcctgtatccctgactaggtgacatacacagtcgggtgctgcatcaccacgtttcagtcagtgatggactgcacatgcgacaatgtcccataaaattacaacgaagccggactcctatcacctagtgatgctgcagccatcacaatgctgtagcacaattactttatttttttaaatttagggtagcctaagagtacagtgcttataaagtctacaggagtgtacagtgctgtcctagccttcacattcactcaccactcactcactcacacctggagcaacttccggtcctgcaagctccattcctggtaagtgtcccatacaggcgtaccatttgtcatcttttatttatttttctgagatggagtctcactctctcacccaggctggagtgcagtggcatgatctccgctcactgcaacctccatctcccaggttcaagtgatcctcctgcctcaacctcccaaatagctgggattacaggcgtgcaccaccacacctggctaacttctttgtattttttttttttttcagccagagtctctatctgttgtccaggttggagtgcagtggcatgatcttggctcactgcaacccccgcctcccgggttcaagcgattctcctgcctcagcctcccaagcagctgggattacaggcacgtgccaccatgcctggctaatttttgtgtttttagtagagatggggtttcaccatgctggtcctgctggtctcaaactcctgacctcgtgatccgcccacctcagctcccaaagtgctgggattacatgcgtgagccaccgtgcctggcctaaacttctttgtatttttagcagagacgaggtttcaccatgttggccaggctggtttcgaactcctgacctcaagtgatctgcccacctcagcttcccaaagtgctaggattacaggcatgaactactgctcctggcccattttccatcttttataccatagttttactgtaccttttttatgttcagatatgtttatatacacaaatacttaccattgtgttacaattgcccactgtgttcagtacagttaaatgctgtgcatgcttgtagcctatgagctgtaggttactttatatagcctaggtgtggggtaggctgtaccatctacgtttgcataagtcactctatgatgttcacaccctgacgaaattgcctaaccatgcatttcttagaacttaagaccgtatagatgaccatatagaaaaccagagactgggccaggtgtggtggctcacacctgtaatcccagcactttgggaggccgaggtgggtggatcacctgaggtctggagttggagaccagcctggccaacatggtgaaaccctgtctctattaaaaatgcaaaaaattagccgggactggtggtgggcacctataatcccagatactcaggaggctgaggcaggagaatcacttgaatccaagaggcaaagatcgcaccattgcactccagcgcctggaccacaagagtgaaactccgtctcaaaaaaaaaaaaaaaaaggaaccgggaaggtcatgaaaggagcgtgctcatgcacaaatgcctgataggaacgattgcggaagactctccaaaaaccacaacctcgcacaaagtccactgcaacgttacacagaaagtacttttgtccagtaactgcctgtccaaccttggactgatgccacccttgtttcaagtctcgtagccaaggataattgattcaaaacactttatgtaatcctcctcattttgcctttgaaaacttccccttggctgggcatggtggctcacacctgtaatccaagcactttgggaggctgacccaggcagacccctagagtccaggagtttgagatcggcctgggcaatatggtgaaactctgtctctagaaaagatacaaaaattagctgggcatggtggtgtgcgactgtattcccagctactcaggaggctgaggtgggaggatggcttgaggacgggaagcgggggttgcagtgagccgagattgcaccactgttctccaacctgggcaacagatcgagatcttgtctcaaaataataataataataattattattgttattattatttaaaaatttaaaacttcgccttgcctcaatctcctctttttttttttttttttaagataaggagaggccagctatgcagtggctcacacctgtaatcccaatactttgggaggccaagacgggcagatcacaagatcaggagtttgagaccagcctggccaatatggtgaatccccaactctactaaaaatacaaattagctgggtgtggtggcaggcacctgtagtcccagctactcgggaggctgaggcaggagaatcacttgaaccaggttgcagtgagctgagatcacaccactgcacaccagcctgggcaatagagagagactccatctaaaaaaaaaaacacacacaaaaaaagagagagacataggattgggccgggcacagtggctcacgcctgtaatcctagcatgttaggaggcttaggcaggtggaccacctgaggtctggagtttcagaccagcccagttaacatggcaaaaccccatctctactgaaaatacaaaaattagccaggtgtggtggcacctgcctttagtcccaactacttggaggctgaggcaggagaatcacttgaacccaggaggcagaggttgcagtgagctgattgcatcagtgcactccagcctggatgagagagactccatctcaaaaaaaaaagaagaagaagaaagaaagaaagaaggaaggaagggagggagggagggagggagggagggagggtgggagggaaagaaattattatgtgagataagacaggtggatctcgtgagcccaggagtttgaggccatcctgggcaacataatgagacccccatctctattagaaaataataatagtaaaaataaaaaataatttaaaaagtattacttctaactataatggaactaagctaaaagccaacaataaaatgaaatttagaaaatctctaaatataagaaaactaaacaacatacttgtagatgacctatgtgtcaaagaaggaatctggctaggtgtggtggctcatgcctataatcccagccaagggaggccaaggccagtggatcaccttagatcaggagttcgagaccagcctggccaacacggtgaaaccgtgtctctactaaaaaatacaaacattagctgggcgtggtggctcatgcctgtagtcccagctacttgataggctgaggcaggaggattgcttgaacctgggaggtggaggttgtggtgagctgagatcacgccactgtactccagcctgggtgacagagtgagactccatctaaaaaaaaaaaaaaaaaaaatcaaaaatgaatttagaaaataccttgagctgaataaaaacaaaaacacaggaaataaaaatgtacaggatgctggcaatgtagtaattagcgggaaacttatagcttaaaaaacatattagtgttgagtcagcctggtgaaaattttaaaaaccccaacacattagaatggaaagaaggcctaaaatcaataatttaggcttccacctccaaagctagaaaaagaagagtaaatcaaactcaaagaaaatagtaagaaggaagtaataaagatctaaatggacagcaatgaaacagaaatataaaaacaatagagaaaaagcaatgaaactgaaattggctcattgaaaacatcaacaaaaccggtattgaaaagattaacaggccaggtgtggtggctcacacctgtaatcccagcagtttgagaggccaaggtgggtagatcacttgaggtcaggcgttcgagaccagcccggtcgacatggagaaaccctgtctctactaacaatacaaaaattaactgggcatggtggcacacacctgtaatcccagctggaggctgagacaggagaatcacttgaacccaagaggccgaggttgcagtgagtcgagatcatgccactgtactccagcctgggtgacagagtgagactcttgtctcaaaaaaagaaaagatcagcaaaactgggccgggtgcagtggttcccacctgtaatcccagcactttggaaggccgaggcaggtggatcacctgagatcaagaattcaagaccagcctggccaacatggtgaaaccccgtccctactaaaaatacaaaaattggtggggcatggtggtgggcacctgtaatcccagctactcaggaggctgaggcaggagaatcgcttgaatccggaggtggaggttgatgtgagccgagatcacaccactgcactccagcctttggcgacagagtgaaactctgtctcaaaaacaaacaaacaaacaaacaaactagtatactggttttcaatgaaatcagttagctcattaaaaagttcaacaaaagagtaagaaaaataaaaaagacagaagccctcaattaccaaaagcaagaatgaaggagggaaaaacactaacatggtacacaaattttaaaaaatcacaggggaatattatgaacagatttaggtcaactaattaggcaatttaaatgaaatgaacaaatccctagagagacacaaattaccaaaactgactcaagaacaaaatagaaacacagatacaatttttgtacaagtatccattgaaatgtattgaaaaatgaaaatgacatagaataaacaaaacaattttgagaaaggagaacaaagttgcaaggcatataatgtgactttaagactcactattcactttgggaggtcaaggtgggtggatggcttgagcccaggaattccagaccagcctgggcaacatggcgagaccatgtctctccaaaaaatacagaaattaactgggtgtggtggcatgtgcctgtagtcccagctacttaggagggtgagcccaggaggttgaaaccacagtgaactgtgatcgcaccactgcactccagcttgggaaacaaagtgagaatctgtctcaaaaaaaaaaaaaaagaagaagaagaagccaggcgcagtggctcatgcttgtaatgccagcactttgggaggccgaggtgggcagatcacctgaggtcaggagttcgagaccagcctgaccaacatggtgaaatcccatctctactaaaactacaaaaattagctgggcatggtggcaggcacctgtaatcccagcactcaggaggctgaggcaggagaattgcttgaactcaggaggcagaggttgcagtgagctgagattgtgccattgcactccagcctgggtgacagagagagactccgtcttttttaaaggaaaaaaaaaaaaaaggccaggcgcagtggctcacgtctgtaatctcagcactttgggaggccgaggcaggtggatcacaaggtcaggagttaagagaccagcctggctaacacggtgaaaccccgtctctactaaacatacaaaaaaattagccgggcgtggtggtgggtgcctgtagtcccagctactctggaggctgaggcaggagaatggcgtgaacccaggaggcggagcttgcagtgagcagagatcacgccactgcactccagcctgggcgacaaagtaagactccgtctcaaaaaaaaaaaaaaaaaaaaagagagaaagactcactataaagctacagtaatcaggaatatgctatcatgataaggatagatatataaatcaaggaatcagaagaatgattaagtccagatttaaaacaacaaaaatggtcaattaatttttaacaaaattgccaatataattcaatgaggagaaaaaacagtcacttcaacaaatggtgctgaaataactggacatctatagagtgagaaaagaaccttgacccttaactcataccacacacaaaaattaactaaaaataactaaaaattaactagaaataatatattaactaatgagacaaaaattaactaaagttaggccgagtgctgtgactcacgcctgtaatcccagcactttgggagaccaaggcgggtggatcacctgaagtcaggaattcaagaacagcctggccaacatggtgaaaccctgtctctactaaaaatacaaaaattagccgggcgtggtggcgggtgcctgtaatcccagatactcagtagactgaggcaggagaatcgcttgaacccgggaggtggagattgcagtgagccgagatcacgccattgcactccagcctggttgagaagagtgaatttccatctcaaaaaaaaaaaaaattaactaaggtttaaaaactaaacttaaatgctaaaactataaaccttctacaataaaatgtaaaaagaaatctttgtgacaaatgtttctcacgaagatttcttaagcaaagatttaagtaggtcacaaaagcacactacataacagaaaaaataactgataaaatgaacgccatcacgattagacttttgttctgaggaagacatctttaagaaaataaaaaggctcggtcaggcgtgggggctcacctctgtaatcccagcagtttgagaggccgaggcgggtggatcacctgaggtcaggagttccagaccagcctggccaacatgatgaaaccccatctctactaaaaatacaaaaattagccaggcatggtggcaggtgcctgtaatcccagctacttgggaggctgaggcaggagaatcacttgaacctgggaggagggggttgcagtgaactgagattgtgccactgcacgccagcctgagcgacagagactctgtctcaaaaaataaaataaactaaaaataaagaaaatgaaaaggctagccgggcacggtggctcacacctgtaatcccagcactttgggaggccaaggtgggtggatcacctgaggtcaggagtttgagatcagcctggccaatgtggtgacaacccgtctctactaaaaatacaaaaattggctagcgtggtggcgggcgcctgtaatcccagctactctggaggctgaggcaggagaattgcttgaacctgggaggtggaggttgcagtgagccgagatcctgccattgtactgcagcgtgggcaacaagagcaaaactccgtctcaaaaaaaaaaaaaaaaagaaaaaaagaaaagaaaatgaaaaggctaaccacagaaggagagaaaatattcatattacatatatttgacaaaggaaatatccagaaaatatgaaaagctcttgcaactcaataagaagaaaataaacaatccaattgaaaatgagcaaaagatttgaacaggcgattcacaagagaggatatcgaatggccacaggcatgtcaaataatggtcaagaacattaaaggaaaatgcaaatggaaacagcaatgaaatatcaataaacatccactagaatggataaaattaaaacaaacaaaaaaaccccaaaacctgacaataccaagtattgataaggataaagcttagctgaaatgttcatatactgaaggttgggagtatagagtggttcaatcatactgaaaaatagtttggccatttctttctttttttcctgagcagatcacaaacttgaagtgttttttgttgttgttcattttgttttttgttttgttttgttttggagacggagttttgctctgtcgcccaggctggagtgcaatggcatgatctcggttcactgcaacctccgcctcccgggttcaggcgattctcctgcctcagcctcccgaggagctgggaatacaggcacctgccaccacacctggctaatttttgtatttttagtagagacgaggtttcatcatgttagtcaggctggtctcaaactcctgacctcagattatccacctgcctcagtctcccaaagtgctgggattacaggcatgagccgccacgcccgacctgaaatttcttataaaggtaagcatattgggcagggcacaggggctcatgcctgtaaccacaccattttgggaggctgaggcaggaggattgcttgagcccaggagtttgagaccagcctggagaatacagtgagaccttgcctctaaaaaaaatttaaaaattaggctgggcgtggtggctcatgcctgtaatcccagcactttgggaggccgaagcaggtggataacctgaggtcagcaattcaagaccagcctggccaatatgatgaaaccctgcctctactaaaaatacaaacaattagtcgggcatggtggcacacgtctgtaatcccagctactcgggaagctgaggcacaagaatcgcttgaactcaggaagtggaggttgcagtgaacagagatcgcgtcattgcactccagcctgggtgacagagtggaactccatctcaaaaataaataaataaataaataaataaataaataaataaataaaatcaaataaaaattatctatgcatagtggcatacacccatagtcccagctgctctagaggctgaggcaggaggattgcttgagccaaggtggaggctgcagtgagctatggtggtgccactgcactccagcctcagtgacagagggagaccctggctcaaataataataataataaataaataaacttaaacatacacttatatgacacagcaactcaactcctgggtatttacccaaaagaaatcaaaacatcagcccacaaaaagacttttcatacaatctttattcataaacatccacactggaaacaactcacgtgtacatcaacaggtgaacagatcagcaaactcaggttcacacaatggattacaacccaaagaaatgaactgcatgaagaaaacacacgaatgaacttaaacattatgtgcgctaagcagaagtagccagacttttacaaaaagagtactatacttttctacccagatttatttatttatttatttatttagagaaggagtttcgctcttgtcccccaggctggagtgcagtgacgtgatctcgactcactgcaacctccacctcccaggttcaagcgattctcctgcctcagcctcccgagtagctgggactagaggcatgcgacaccatgcccaaataatttttctattttcagtagagacaggtttcaccatgttggccaggctggtcttgaactcctgacctcaggtgatccacccacctcagcctcccaaagtactggaattataggagagggccaccgcgcccagcctccaccaagttttagagcaggaaaaactaatttaagaagcttgagagtggatcagtggtcaccacccaggtgccaggggtgtggctgggaggggtgatggaaatctcataagtagactctaccttgatcatggtggccacacaatgggatgtgtttgtctaaattcacggaaatgtacactttttaaaattttttttatttacttatttatttttttgagatggtgtcttgctctgttgcccaggctggagtgcagtggcaccatctcgggtcgctgcaacctctgcctcccaggttcaagcgatcctcctgcctcagcccccatagtagctgggattacaggcatgcgccaccacgcccagctaatttttgtatttttagtagagatggggtttcaccatgttggccaggctggtctcgaactcctgacctcaggtgatccacctgcttcggcattccaaagtgctgggattacaggcgtgagccaccccacccagccaaaactgtacactttaaaaggaagaattttactgtgtataaatgacatctcaatgaagttgatattaaaaacaccaaggctaggtgaggtggctcacgcttctgttcctagcactttgggaggctgaggcagcaggattgcttgagtccaggagttcctactgtgtctagccactgtgccaacccttccttgagttcccaattgggaaacttcccaatgaggaatttgatgcctacagaggttgagtgaccctgtccttaaaaaaaaatttttttttttaattagccaggaacggtggtgcgtgcctgtagtcccaggtactctggaggctgagtcaggaggatcgcttgagccttggaggtcgaggcttcagtgagctgggatcatgcccctatgctccagcctgggtgagacagagcaagacgttgtctttgaaaatatataaaaagtggctgggtgcagtggctcacatctgtaatccctgcactttgggaggctgaggtgggtggatcacctgaggtcaggagttcgagaccagcctgaccaacatggtgaaaccccatttctactaaaaatacaaaaattagctgggcatggtggcacacacctgtaatcccaactactcgggaggctgagacaggagaatcgcttgaacccaggaagtggaggttgcagtgagccaagattgcgccactgcattccagcctgggcaatagagcgagactctgtctcaaaaaaaaaaaaaaaaacaaaaacggatatatatatatgtatatacatatatacacacacatatacacatatacatatacacaaacacacacacacacgcacacacacacacacacatatgtataaagtaataaatgaaagcaaacaaaatgtaatttccagaggctaagaccccaaggagaggaatcgcattcacttgggtccaccatctacttgatgtgtgatcttaaaccaattcactcaaccttcgtgggcaccaaattcctcattaggaaactatgcatagaggatctccttcagaaggttgtttcggggattgaaggaatggttagcgcagcggctacacatagtaggaactcagggaatgctgctgggactcacgttcctaagccatgaaaaccgtccagtgggtggagggtgctaccatttatgcatggaggggaagaaactacccgtgcatatgtgcagaggtccacaggggattttctgaaagatacacatgaaatgaagaccagggaaacagcagtattctcccagtaaagaggatagatgtatgtgtacatatatgtgcatatacatatatacacgtatatttataaatgacaaacacacaaaaataacagtataaatctccatttgttatatatttaaattttttgtagcgatcgggctgttgctatattatcaaggctggtctcatacacctggcctcaagcgatgctccgacatcagccttccaaagtgctgggattacaggcctgaggcatcgcgcccagctccaaatctccattctcggtgaaccatttgagaaaaaatcgcaaacatgttgcatctccaaatacctaactatgttttccacaaacagggacaggttcccacgtgcacactgtaaggcacggtgaaaatcgggacattaacacggctgaatcgctaccatctaatccgaaggcccaaccacattcaccacttgtgccaataatatgttcatttcactgtatgttttgaaatgtgtaccacatgtatatgttatctttacgaaaaaaaaaatagtatgttgaaaccactcgtcacagccaaatgaaataagagctaactcattcaagcaggagccccggaggactaaaagaatccggcctctcccaggcctcctcacctgagcagggctccctcctgactaccgcccacccactccagggcaggacgcgggaagagactgcccagcccgagggtcgcaggggcagaaaaccccaggtcctgaacgcgcctgggccccgcggcgaacctggcgtccccaccagacaccagaatcagattcaggccaggccaggaaccaccccagcttcctgcatccgccttggtccaggcagcaatgacggcggcggccgccagggggacggaagctcaagggcggggatccaggcccaagcctgggcgcgcccaccaaggcgtggatccggacgaaggttccggaacagccggtcccgagcacccacgtgcagcttccgatcacagccctggcgtggcttctctgtccccggctaaggcccgcggtcgctgcagggtgcctcgccgagggtgcgggctcggggctcacagtgctcccagcctctcccaccccaaccccgccattaaggggagccccagcgacgccctgaaccctgaaagtcacactggggccggggctgcacttggcgtccgcttcccctcccgtcacagtgaccagggctagggccgcggtcggggccgtcggggagagcggagggcgcgtgggaatggggctcgctgcgccacggaaatcccgcgccgcccttcgagtcctcccagctgctccgcagagccggggccgctgccatcgcgtctgccccgagggtgcgcaggcgggtacctgtcccgactcggggaacagcgggagcccggagacgcccgtcgggcttcccagccccacctgggacgtctctaggggcgggaggccaggagagaagagggtgggagagatgagctgcagggggatacgggacccagggacccgggatcttataacacgctttccacccgtaggattggggcccacaaatgaccagaaaggtgggactcattcgccccctttgcagatggacccatgttggcgccccttagatctgcagtgggggcaccaggacctgcggtgagcgcctctgcgccccaaacgccagcaggtccgcccgaccgcattcccagctggcttgctttgcacaaatgctgcgtcagggcacgccccacacccactccttcccagatcgcgaccctcacgccttcgcagacagaaagtgtcctaagcacaggcaggctcagagcccgcctccgcctcggattcgctgtgtggcccggagccagtatcttggcctctctgggtctcagtttgctcatctcagtgaatgggacacagacacagtcgcgctgcgggctaacgctttatttgccagccaaggccccgggcccgcctgggcttctgctcagaagatcctcacggagtccagctgcacgtccccgcccacctccaccaggcgcacgcgcgccagcggcaggcggtggcggaagtggtggtactgggcgtccccaaccacggcctgcaggggagggtcggtggtgaggattccggaggcccgtgctgggtggccctggggaaatcactcatcccctctgggcctcagtttcctcactgggaaaatggggctattgttcattctaactcttgcgtgaggatcaaacgagttgactgtgtggcacagtaaaaagaggcttttttagtgctggtaatggatattctcatttcagcgaccattacccgctattaaagcgcagaggagggaggtgaattcgcgtaagctgtgggtggtggaggatctgccgccactcccacccgccaatccttgctaggacgagttcctgggcgctgtttccaacccatccctccccatgcctcaaaccccggacctcaggaaggaatgaactgggagtagggtctgggatggcgagtctgggccacgccttcccgctaggacgcccaccccttggacacttggctggtgctcgcctcgtcctgaccctgctgtctctctgtccctcggacccaagtgggagttgtttaggcgagagagagggtcgaaggacacccttctccgccttggccacgacttccctacccccctcaccccgccccgaacctccctgccttccaccaatagcctggctttgcccaaccctctgctccagggacctaagtcttggcgtccacgcccctgtcgcagagacgcaccttgaagccgtcgtctgacgcgatgatgagcacctcgaagggctgcccgcgctggaaaggaacgcccggcccgcgctcctcgcggccccaggagccttgctccttgctgttgaagaccacctccgacgtgtccagccgggggttgaaatgcagcgcggcatcggagccctgctcctccccgcacagcaggtttacatggaacctggaagaggaggatggtggccgtcagggctcagaaaccacccagaccaagaaatgttgagggtgaggaataccgatgtctacaatttactttgaatgaataagtaaatgaaatgttggctgggtgcagtggctcaccctgtaatcccagcactctgggaggtggagaagggaggatcgcttgggcccggaagttaaagaccagcctgggcaacatagcgagaccccaccttacaaaaaaacgaaagaacaaacaaaacataaaccgcccagaccaaagtgaaggtcttatggactggcactccccattcccagagtacccccaaattaacagggacctgaagacaggcacacaccgcagaaggagaggtaggcgactaatgaccagggagcttagattcccaaggcagccaaaatatcatgaggcccttggcagaaacctacccagaccaaactcactacgcttagggcagggtgccctcatttccaaagagcctgggagctgcccaggaggtctgggtgatagccagggtgctcctgatgctcagggaaccctcagcttctacaggacaaagaataataccaggaaccccagtatttccagggtacctcagaatccagaaggcccgaagttccttagccaggaagtcaaaggatggcttggcaaggactcccagggtccagggtgtctccaggacttggagtatttccagagttccctgggactcagacatggaagtcataggactatatctaggaaccctgagattacccagggacctcaaatgcttagggaaacttagggaccccagccacaaaggcacgggggcaaatacgaatacatcagatttgaggtcagaaatggcctcggactcctagcctggtggatacaggtggcctcgggcccctacttctggactgcaaaaattgggagtcagctgatcctgagacctgtaccctttacccctagggcctggggcctcacctgctggcattgggaggaaccaagccgcgaattctcagcaccgtgccagggcggatgccctcgggcagtgaggacttgtgggggacgttctgcaagagtggggtgcaggggccactgtgagccggtgagaccgaaggagggaggcagaaggtgggtcacccctcagaggagccgaccagggctgagactggcagaaatcagtggaagaggaaagggtggcggagaggcaggaaagagaccagaaacagacagggaaacagatggggagagcaacaaagacaaacagaaagatcctcaaagagggccccagaggaagccacaaagaggtagaggggacagtcgggatgggggttacccggaggccacagcccaggccagtccgtggcacactcactgcccacttgctcctttgaaagaggagcccccagccccctccctgcttggccccgccccgggcccctggagcactcacggacatggctgggaccgggttgggcagccgtggtggtggggcctgctggggaccttaaataaaagcagggcggggctggccctgatgactcaccccaccccttcccacccaccacccacacctggcacggaccctggccctggggcaagcccggcgaagcgggagtggcacctcttcttgggggccctgatccccccatcacccagggcccgggtgcactgcccctctcctaggagctgataataagagggaatgtttaatagtaataaactcacagcagagaaggctccttgtgccactgcccctccacccctgtcttcccgctgcctggcacacggagagcctctatctcatttcatgtatttatttgttagtaatttctcttattttatacacagacatattaggtcctgggaggccaatctgggtgggaactccagacccttctctccagctgagaacctcctgcctggactgatccgtgctgaaatctaagcttctgcctctgtaatggaacagcggccacaataggagcactagtgactgacagggtggcttcatgggttcacagggggcctgcctgatcccctcagcgctgcacccctgggtcctggagtgtgcccagttcatggaagtcctcagtcaggaggggtgaaaggaggggatccactaggactatgcctgtcatttccaaggcccctcggctgcccaggagatgcaggaaatcactgattgggaccccatcattccaacagggaggagtatgggtcacccccattgtacagaggaggaggctgaagctgggatgggaagcgatttgccaaaggcaggagcgtgcaggacccgttgccctgacctctggctctcctcacctctgctcgcacctctcctgtgggttctgtctctggggctggctgtctcactctgtccgtctctgcccctaactctgtctaccacatattcctgtcccacttctctccttcaagtctctcttcttcctccttccaggactgctaccatcatgccaccaagtttgtaggtcaggatgaggtgggttttggggtggtgggtggcctagcattccatcaccacctagatcaaaagcagagcaaggcggggaccctcccgccaggcccgaaacagcccccttgggcctaagactctgcaagagaactcagggttggggaattggcttggtggaggggcgggtagggctgaaagatgcttctgaaaggcagggatggtgtgggagctgagcagaaaccactcctagcagcccagcagccctcctggaccttttccactcgccactccagctcctgccccacccagcaggctgctgagaggcctgggcagaggcaggctggcagtggaaagtttgggtggagacagcagacccagaaccatcctccaccctctgcgtcccaggcccccagcctctcgccccctccccacacactccaaggcaccaagctcagggaccagttcttgggaacatgagctcagagagggaggctagcagctgcatttcagtaggggctgcaagcacccccattctgcagaggacaaaactgaggcttagacaggggccacctctcagtcaaggaagaggccagcccctcagctccagaggggtctttgtgccaaggacatgtcatgggcacggacagagaggatagcagggtgtccggtgatcataccaccagcccagctcagttagttcccgagaatgttcccctgaatggtggactccattgttctaacattattgaccattctaaagaagacactctcgcctgggcaacacagcaagacctcatcactacaaaaaataaaaataaaataaaatagcccagtgggttggcgcacatctgcctgtaattccagctacttgggaggctgaggcaggagaattgcttgagcccaggagatcagaggctgcagggagctatgatcacaccacagctctccagcctgggcaacacagtgagacctcagtccacaaaaagaaaagacactccttacattacttgatacatcattctgtaccttgctattgtttcccaagaacatctttttatttatttctatttcttcactgtggctggatatgacttcacacccaaccaacgtgcaagtcccaacttgccttaagtgattggtcaaatggttgcagtcaatctgttaccagtctaaaaggctggctcctttcctgtaactgagatatgcatcctcgatgggctcttattcattagtgttggttatgtttctcatcagttgtgaaacaatattttcttttgttttttttttcttttgttttttttttgagacagaggctcaccctgtcacccaggctggagtgcagtggtgcgatctcggctcgctgcaacctccacctcccgggttgaagtgattctttggcctcagcctcctgagtagctgggattacaggcacccaccaacatgcctggctaatttttttgtttgtttgtttttggttttttttgagacagagtcttgctctgccgcccaggctggagtgcagtggcaccatttcggctcactgcaagctccgcctccctggttcacgccattctcctgcctcagcctcctgagtagctgggactacaggctcccgccaccacgcccagctaattttttgcatttttggtagagacggggtttcactgtattagccaggatggtctcggtctcctgacctcatgatccgcccgcctcggcctcccaaagtgctgggattacaggcataagccaccgcgcctggcctaatttttgtatttttagtagagacagggtttcgccatgttggtcaggctggtctcgaactcctgacctcgtgatctgccctcctcggcctcccaaagtgttgggattacaggtgtgagccactgcgcctggcctgaaataatattttcgtgagccttttttctttttctttctcgttttttgagacagagtctcgctctgttgcccaggcaggagtgcagtggtttgatcttggctcactgcaacctctgccttccaggttcaagtgattctcctgcctcagcctcccaagtagctgggatttcaggtgcctgccaccacgcctggctactttttgtatttttagtagagacggggtttcaccatgttggccagactggccttgaactcctgacctcaggtgatccacctgcctcagcctcccaaagtgctgtgattgcaagtgtgaaccaacgcacctggtcaccttttttcaattttaaatagttaatgtaggccgggtgtggtggtgcacacctgcattcccagctactcgagaggccgaggcaggagaattgcttgaacccaggaggcagaaattgtagtgagccaagatagctccattgcgctttagcctgggcaaaaagaacaagactctgtctcaaaaagtatatataataataataataataataataataataataaatgtatatatttctcaatagtctttctatcaaggtatccttcccataaaataaaagatgcagatattaaaggtatagttcactgattttgagaactgtggagacctatctaaccacctcctcaattaagtttcctggtgtccaggaaatagtggcctctcttctagttccaggaagccactggccagtgtcactcctgaccatttttttgttttgttttgttttgttttgtttttgagatgggggtctcactctgtcacccaggctggagtgcagtggtgcagtctccgctcactgcagcctcaatcttccaagcttaaacctcctgggctcaccacctcagcctcccgagtagctggggctacagacacacgccaccatgcctggctaattgtgtattttttgtagagagagggttttacgatgttgcctaggctggtgttgaactcctggagtcaagcgatctgcctgccttagcctcccaaagtgctgggattacaggcatgagccactgggcctggccactgctgagcattgactagccaccgaggttcttttgtctcaaaataaagaagagggagtagactgatttttcttactttatgcctcttttaggaaataatttagatgaaaagtagctaattgcacactaggtggttgtagagatttaaaattcaggctccatgaatgtcatttgttggtcacattttggttattttttatacacagtgaaggtaattctggggctgctttttgtaaatcaacattctgatgatgaaaatgacacttagaaatctcactttggctgggcacggtggctcatgcctataatcccaacactttgggaggccgaggcgggcggatcacctgaggtcaggagttcgagaccagcctggccaatagggtgaaaccccgtctctactaaaaatagaaaaaattagccgggcatggtggcaggcacctgtaatgccagctacttggggggctgaggcaggagaatcgcttgaacctgggaggcagaggttgcagtgagccaagatcacgccattgcactccagcctgggggacaagatcgagacttcctctcaaaaaaaaaaaaaaaaaggaaagaaatctcactttgttcttggccaggcgcagtggttcaccctgtaatcccagcaccttgggaggccaaggcggtggatcacctgaggtcaggaatttgagaccagcctggccaacatagtgaaaccctgcctctactaaaaataccaaaaaattatatatatctatattagctgggtgtggtggcacacacctgtgatcctagctacttgggaggctgaagcaggagaatcacctgaacccgggagacggaggttgtggtgtgtgatcgcaccactgcacttgagcctgggcgacagagcaagactccatcaaaaaaagaccaaacaaaaaaacaaaaacaaaaacaaaaaaaccccagaaactcactttgttcttaagcttttatgcccattggaaatctcacgactctatttttataaatatagtaaatattaataaaacaatccaattaccgctaagaaaaagtctattctctagtgttcagttccatttataaacttagttaattaaactctcttaaatattttaaactgaatgcataattttagaggttattcatttttcagtgtttcaattgctctataaactcatccaagtaattcttgtaagtttcctagtgattcttgtacatttcaatgcttaaacagtaaaatacatgcatagctttttcttcttccttcctttccttcctttccttcctttccttcctttgctgaacaattgggccctaaagctattatgtggggctgagcaaggtcatggtggccctgaatgggctgattggggtgggatgtccttgggagaggtgtttgggggtcagggctgagcaggatgaggagcgctcagcagaggctgcgcgtaagtgcccagtgagggccagcaggacacgtgacagggagcctgcactcccagcatgggaggaggacacctgtgtggggtgggtgcccgacgaggggcattggaaccagcctcggggggaggtgccatgtgggagtcagagatgaggactggaactgctttttttttctgggagggagttacagatatggaaagggagaggtaggcaccagccctgtggagctggactggaagtggaggcattagcgtgagctaatggtttgaggattgggttatttggtggggcaggtttggactctttttatttttatttaatttaacatatttatttatttatttagacagagtcttctctgccaccaggctggagtgcaatggtgtgatctcggctcactgcaacttccgcctcccaggttcaagcaattctcccacctcagcctcccgagtggctgggactacaggcatgtgtcactgcgcctggctactttttgtatttttagtagagacgggggtttcaccatgttggccaggctggtcttgaactcctgacctcaggtgatccacctgcctcggcctctcgaaatgctgggattacaggcgtgagccttcttataccagtttttttttgtttgtttgtttttgtttgtttgttttttagacagagtgcaatggcgtgatctcgggtcattgcaacaacctctgcctcctgggttcaagggattctcctgcctcagcctctcaagtagctgggattacagacatgcaccaccatgcccggctaattttgtatttttagtagagacaagatttctccacgttggtcaggttggtctcaaactcccgacctcaggtgatccgcccgccttggcctcccaaaatgctgggattacaggagtgagccctgcgcccggcattcttatggtagttttatacccaagcccactgaagaccgtaggagggagaggtaaagttttctttcccctgcaaaggacattcgagttgtttccactgtttggctgttatgaataatgaacgcttctacgaacattttgtttaaatatttagcacgaacatgtttttattccccttgggcatatccctaggagtagaatgcctgggtcccaagggtaacttatgtcacactttcctcccttattcagcagtcagtaaaggctggtaaatttcatctggctgtcctgtcattctctttgaatttggaacaatcatccaccctttttggtttatatgacattgactcttcaaaactcccaactatggccgggtgtggtggctcacatctgtaatcccagaactttgggaggctgaggtgggcggatcacctgaggtcaggcatttgcgaccagcctggccaacatggggaaaccctgtctccactaaaaatacaaaaaattagccgggtgtggtgacgcacgcctgtaatctcagctactctggaagctgaggcaggagaatcacttgaacgcaggagaatcgcttgaacccgggaggcggaggttgcagtgagccaagatcacgccattgcaatccagcctgggtgacagagcgagaccttgtgtcaaaaaaagacatgggaccttcattcaattaagattcatagtatgcagcaagatagaaccccctagtagggagcagtggctcacgcctgtagcactgtgagaggctgaggcaagaggatcgtttgagaccacgagttcaaggccagcctgggcaacatagcaagaccctcatctctagaagaaataaaaagctggacatgaccaggcgtggtggctcatgcctgtaatgccagcattttggaggtgaggtgggtggatcacctgaggtcagaagtttgagaacatggcaaaaccctgtctctactaaaaatagaaaaattagccaggcgtggtggtgctcgcctgtagtcccagctcctcgggagactgaggcaggagaatcacttgaacctgggaggcagaggttggttgcagtgagccgagatcctgcgctccaaccagcctgggcgtcagaaagagaccttgactaaaaaaaaaaatcccctgtttaagacagatggattaattccttctgtttctgtccataggctcttgattgcttcttaggacttctccaaaagtggaagaaacaagaaaacgttgtcattctgaaacatctttactatttttctgaggctgcagccttggccagcccgcaatctgcctttccaggcacagcaggtgacagtgtgagtggataatttgttaccatgtagcaagagacactggctttccaccctgcaatacaggagtccttcctatcagcctctcctctatctcctccagccacgccctcattttaagttctgctgcctgtatcagccacttctcccactgtcatgttggggttgctggttgctggcaacagaaccctcctccgctagtttacagagattattagcggctatgacagcttacagaatttttttttttttttgagacggagtttcgctcttgttacccaggctggagtgcaatggcacgatcttggctcactgcaacctccgcctcctgggttcaagaaattttcctgcctcagcctcccgagtacctgggattacaggcatgagccatcatacccagataattttgtatttttagtagagagggggtttcttcatgttggtcaggctggtctcgaactcccaacctcaggtgatccgcccgccttggcctcccagagtgctgggatcacagacatgagccaccatgcccggcaatagcttacagaattttcagaggactagggaataagcttccgtgctgcaaagctagagggtggatgcggagagcattccctggccagagcttcctaggctgttctagataaaaataaatacctccatcacctaactagccagaaggctcatctccctcccgtaagtgttacctcattttcaccttctaagttttgcaggtggtggagtgcagtggctgatacctgtaatcccagcactttgggaagctgaactgggaagactccttgaggccaggagtttgagaccagcctgggcagcagaggaagaccctgtctctacaaaaaaaaaaatttaaaaatgagccagttttgggccaggcatgggggctcacacctgtaatcccagcactttgggcaactgaggctggtagatcgcttgagcccaggagttcaagaccagcctgagcaacacagtgagaccctgtctctaaaaaaaaaaaaaaaaaaaaaaaaaagccgggcacagtggcacatgcctgtaatcccagctacttaggaagctgaggcaggaggattgcttgaacctgggctgttgaagctgcagtgaggcgagatcacaccactgcactccagctggggtgacagagtgagatcctgtctcaaaaaaagaaaagagtcaggcgcggtggttcacgcctgtaatcccaacactttgggaggccgaggcgggcagatcatgaggtcaggagatcgagaacatcctagctaatacggtaaaaccccgtttctactaaaaaatacaaaaaattagccgggcattgtggcgggcgcctgtagtcccagctagttgggaggctgaggcaagagaatggcatgaacccaggaggcagagcttgcagggagcccagatcacgccactgcactccagcctgggcgacagagcgagactccgtctcaaaaaaaaaaaaagaaaagaaaagaaaagaaaaaattagccaagtgtggtagcacacaaccgttgtcctacctactactccagagactgaggaaaattgcttcagcctgggagttctaggctgcagtgggctatgatggtgccactgcactccaggctgggtgacagggcaaaaccacagagcaagaccacttctttcttggctggctggctttctctttctttctttctttctttctttctttctttctttctttctttctttctttctttctttctttctttcttctttctttctttctttctttctttccttctttctttctttttctttctttctttctttctttcatctctctctctcttccctccttccctccctctctccctccctccctcccttccttccttccttctctctctctttctttttggacagtcttgctctgtcacccagcctggagtgcagtggcacaaattctgctcactgcaacctccaccttctggattcaagtgattcttgtgcctcagcctacccagtagctgggattacaggtgcgtgccaccatgccaggctaattttttgtattttagtagagacggggttttgccatgttgcccaggctggtcttgaactctggagctcaggcaaactgcccacctcagcctccaaagtgctaggattacaggtgtgagccacagtacctggccacgagggcatgtcttcaaaaaaagagttttccaggggtgcaaactcagcttggggaaacccagtcctatgtgaatctagctacaaataactctgggaaatgtagtttttaactgcctaatgcaagaaagcaggccaggctgggtgcggaggttcacgcctgtaatcccagcactttgggaggccaaggcaggaggatacttgagttccagagtttgagaccagcctgggccacatagtgaggcatcagctctactaaaataaaataaaaaaaaaattaactgggggtggtgtcacatgcctgtagtcccagccactttggcggctgaggcaggaggattgcttcagcccaggaggttgaggctgcagtgcatgatgatcttgcctgggcaatagattaaggccctgtctcaaaaaaaaaaaaaaaaaaaaaaaaaaaaaggtgggcccgctggggagtgagttagaagctgagtaagccaatcttcagtggtggttaccaaattacttggaaagatataattagttacatagtgggtaaatgtctttaactgtgggaacagttagaattcactaaaaagatttttacctgtatcattttcatcactggaatgttaatatataaaaccaaaggagtccctgaagtatcttcactgtgtttaaaaaataaccaaaaccacagggcatggtggctcacacctgtaatcccagtactttgggaggccagaagttggaggatcacttaagcccaggttccagactagcctgggcaacatagccagacccttggctaggcacagtagttcacatctgtaatcccagcacttttgaaagctgaggtgggtggatcacttgaggtcaggagttcgagaccagcctggccaacatggtgaaaccccatctctactaaaaatacaaaaatcagccaagagtggtggtgcatgcttgtaatcccagctactaagtaggccaaggcaagagaatcgcttgaacccaggaggcagagctgagattgagccactgcactccagcctgggcaacagagtgagactccatctcaaaagaaaaaaaaaaaagaacccatcaaggacgtagatctgttatcagaaatgagtcaggacttcgggctgataacagagttaatgtgcaaacccttggccaatcagcaaaggcacattgggacttgcagtatgttggctacatgtgaagttacatccagccacagtgaagcaatcactaaaaaaaaatcaaaaataaaacaaaaaacaataactcaaaatatcactaacaaaatggcactgacagaacctggggttttaaatccctacaaacacttagtgtgcgattagttacttttcaactaagttatatcctgaaagaggcctaaaatcagaaaaatcagtctgtcccaacccactttctcattttcacggcaaatgaacttatttttcttttcttttcttttctttttttgagacggaatcttggagtcttgctctgttgcccaggctggagtgcagtggcgcgatcttggctcactgcaagctccacctcccaggttcatgccattctcctgcctcagcctcctgagtagctgggactacaggtgcccgccaccacgcctggctaattttttgtatttttagtagagacggggtttcaccgtattagccaggatggtctcgatctcctgacctcgtgatccgcccgcctcggcctcccaaagtgctgggattacaggtgtaagccaccgcgcctggccttttttttcttttttgagaccgagtctcgctctgtcacccagtcttgagtgcagaggtgcgatcttaactcactgcagcctccgcctcccaggttcaagtgattctcttgcctcatcctccccagtagctgggactacaggcaggcgccacgctgtcgcattggccaggctggtctcaaactcctgacctcaggtgatccgcccgccttgttacccaggctggagtgcagtggtgtgatcttgggtcactgtagcctccacctccagggctcaggtgatcctcctgccctagcctcccgagtagctgggactacaggcacatgccaccacaatggatcaaaggaaactttgtggctactaactgctcaggagtgacagtggcttcatgtggcagaaggagcagtgactgtttctaggggcaccaggaaacttgattggggaggtggttacacaggtgactatatgtgtcaaaactcattgaactattccattaaaatctgaaccctgagcaggggctcacacctataatcccagcactttgggaggccaaagcaggtggatcacttgagtccaggagtttgagaacagcctggacaacatggcgaaaccccatcagtacaaaataatacaaaaattaggcaggtgtggtggcacactcctgtagtcccagccactcaggaggatgaggtgggaggatcacttgaatctgggaggcagaggttgcagtaagttgagatcataccactgcactccagcctgggcgacagaacaagaccctgtctcaaaacaacaacaacaacaacaaaatctgaaccttttatttaatgggaaaaatacctcaatgaaataacaattgggaaataaacacattagttatttaaaaccgaaaaaagacacacaaatattaccgtggccaggcctgtaatcacaacattttaggagaccaaggtgggaggatcgcttgagcccaggagtttgagaccagcctgggcaacatggtgagacctcctctctaggaaaaaaaaaaaaaaaaaaaaaaaagctgggcatggtggcgtgcaactgtagtccaagctactccagaggcgggaggattcccaagcccaggaggccaaggctgcagtaagccatgatcacagagagagccagaccctgtctcaaaaaaaaaaaaaaaaaaaattattgcacaactaatgagaaagataacacaattgaataagaactcatcaagggctggatgcagtggctcatgcctgtaatcccagcattttgggaggctgaggtgggtggatcacttgagggcaggagttcaagaccagcctggccaacatggtgaaaccctgtctctactaaaaatacaaaaattagccatgagtggtggcacatgcttgtaatcccagctactcaggaggctgaggcaggagaatcacttgaacctgggaagcagaggttgcagtgagtcgagatcgtgccactgcactccagcctgggtgacagagcaaaactctgtctcaaaaacaaacaaacaaacaacaacaacaacaacaaaaacccatcaaggatgcaatcaaggatgcagatctgttaccagaaaggagtcaggacttcaggctaataatagagtgaatggaaagctttggccagtcagcaaaggcacgttgggacttgcagcatgttggctgcatgtgaagttacatccagccacagtgaagcgatcactaaaaagttgagttcctgggaaacacggtacacagcatgaggcgtcagtaatgtgaggagtgtgttctttagaatggtcaataatgttagaatgatggagttcaccattcaagggaacattctcgggaactaactgagctgcgctggtggtgtgatcaccggacaccctgctgtcctctctgtccgtgcccatgacatgtccttggcacagacacccctgtggagcccagggcctggccgcttccttggctgagaagctgtccctgtctaggcctcagttttgtcttctgcagaatgggggtgcttgcagctcccactgaaatgcagctgcaagcctccctctctgagctcacgtccctaggaactggtcccccaccttggtgccttggagtgtgtggggagggggcaagaggctgggggcctgggacaaagagggtggaggatggttctgggtctggtgtctccacccaaactttccactgccagcctgcctctgcccaggcctctcagcagcctgctgggtggggcaggagtgcaggagttgggtggggagtggaaaaggtccaggagggctgctgcattgctaggagtggtttatttttatttatttatttgtttgtttgtttatttatttttgagatggagtcttgctctgttgcccaggctggagtgcagtggcgcgatctcggctcactgcaagctctgcctcccgggttcatgccattctcctgcctcagcctcccgagtagctgggactacaggtgcccgccaccatgcccggctaattttgttttgtatttttagtagagacggggtttcaccgtgttagccagtatggtctcgatctcctgacctcgtgatccacccgcgtcggcctcccaaagtgctgggattacaggctttatttttattttttgagacagagtctagctctgtcgcccaggctgcagtgcagtggtgtgatctcggctcactacaacgtccgcctccccagctcaagcaattctcctgcctcagcctcccaggtagctgggattacaggtgtccaccaccacacctggccaattttttgtattttctatagagaaggggtttcaccatgttggccaggctggtcttgaactcctgacctcaagtgatccacctaccttggcctcccaaagtgctgggattacaggcgtgagctaccatgcccagccaggagtggtttctgttcagctcccacaccatccctgcctttcagaaacagatttcagtcctgcccgcccccccccccccccccgcctcccccagtctacttccccaaccctggattctcttctagagtcttgggcccaagcgggctatattggggctggcgggagggtccccaccttgctctgcttttgatctaggtggtgatggaatgctaggccacccaccaccctaaaacccacctcatcctgacctgcaaaattggtgggaagatggtaacagtcctggaaggaggaacaagagagacttgaaggagagaagtgggacaggaatacgcggtagacagttatagacagagacaaacagagccagacagccagccccagagacagaacccacaggagaggcacgcccagaggtgaggaaaggcagaggttggggcaatgggtcctgcccggcttgtggaaaatcacttcccatcccagcctcagcctccttctctgtacaatgggggtgacccatgcttctctctgttggaatggtggggtcccaatcagtgatttcctgcatatcctgggcagcccaagggcctgggaaatgacaagcgtagtcctagtggatcccctcctttcacccctcctgactgaggacttcccatgaacccggcacactccaggacccaggggtgcagcactgagccaaccaggccgccctccgaccctgtgaagtccccctgtctggcactatcgtcgttgttgtggctgctgttccactggagacttagaagcagggatttcagcgcagacatttccagtctaggcaggaggttctcagctggagagaagggtctagagttcccgctgggcttggcttctcaggacccaacatgtctgtggataaaatgagcatgagagactctcctgtgtgccaggcagtgggaagacaggggtggaggggcggtggctcttattatcagctcctaggagaggggcagtgcacccgggctctgggtgatggggggatcagggcccccaagaagaggcgccactcccacttcgccaggcttgccccagggccagggtccgtgccaggtgtgggtggtgggtgggaaggggtggggtgagtcatcagggccagccccgccctgcttttatttaaggtccccagcaggccccaccaccacggctgcccaacccggtcccagccatgtccgtgagtgctccaggggcccggggcggggccaagcagggagggggctgggggctcctctttcaaaggagcaagtgggcagtgagtgtgccacggactggcctgggctgtggcctccgggtaacccccatcccgactgtcccctctacctctttgtggcttcctctggggccctctttgaggatctttctgtttgtctttgttgctctccccatctgtttccctgtctgtttctggtctctttcctgcctctccgccaccctttcctcttccactgatttctgccagtctcagccctggtcggctcctctgaggggtgacccaccttctgcctccctccttcggtctcaccggctcacagtggcccctgcaccccactcttgcagaacgtcccccacaagtcctcactgcccgagggcatccgccctggcacggtgctgagaattcgcggcttggttcctcccaatgccagcaggtgaggccccaggccctaggggtaaagggtacaggtctcaggatcagctgactcccaatttttgcagtccagaagtaggggcccgaggccacctgtatccaccaggctaggagtccgaggccatttctgacctcaaatctgatgtattcgtatttgcccccgtgcctttgtggctggggtccctaagtttccctaagcatttgaggtccctgggtaatctcagggttcctagatatagtcctatgacttccatgtctgagtcccagggaactctggaaatactccaagtcctggagacaccctggaccctgggagtccttgccaagccatcctttgacttcctggctaaggaacttcgggccttctggattctgaggtaccctggaaatactggggttcctggtattattctttgtcctgtagaagctgagggttccctgagcatcaggagcaccctggctatcacccagacctcctgggcagctcccaggctctttggaaatgagggcaccctgccctaagcgtagtgagtttggtctgggtaggtttctgccaagggcctcatgatattttggctgccttgggaatctaagctccctggtcattagtcgcccacctctccttctgcggtgtgtgcctgtcttcaggtccctgttaatttgggggtactctgggaatggggagtgccagcccataagaccttcactttggtctgggcggtttatgttttgtttgttctttcgtttttttgtaaggtggggtctcgctatgttgcccaggctggtctttaacttccgggcccaagcgatcctcccttctccacctcccagagtgctgggattacagggtgagccactgcacccagccaacatttcatttacttattcattcaaagtaaattgtagacatcggtattcctcaccctcaacatttcttggtctgggtggtttctgagccctgacggccaccatccccctcttccaggttccatgtaaacctgctgtgcggggaggagcagggctccgatgccgccctgcatttcaacccccggctggacacgtcggaggtggtcttcaacagcaaggagcaaggctcctggggccgcgaggagcgcgggccgggcgttcctttccagcgcgggcagcccttcgaggtgctcatcatcgcgtcagacgacggcttcaaggtgcgtctctgcgacaggggcgtggacgccaagacttaggtccctggagcagagggttgggcaaagccaggctattggtggaaggcagggaggttcggggcggggtgaggggggtagggaagtcgtggccaaggcggagaagggtgtccttcgaccctctctctcgcctaaacaactcccacttgggtccgagggacagagagacagcagggtcaggacgaggcgagcaccagccaagtgtccaaggggtgggcgtcctagcgggaaggcgtggcccagactcgccatcccagaccctactcccagttcattccttcctgaggtccggggtttgaggcatggggagggatgggttggaaacagcgcccaggaactcgtcctagcaaggattggcgggtgggagtggcggcagatcctccaccacccacagcttacgcgaattcacctccctcctctgcgctttaatagcgggtaatggtcgctgaaatgagaatatccattaccagcactaaaaaagccgctttttactgtgccacacagtcaactcgtttgatcctcacgcaagagttagaatgaacaatagccccattttcccagtgaggaaactgaggcccagaggggatgagtgatttccccagggccacccagcacgggcctccggaatcctcaccaccgaccctcccctgcaggccgtggttggggacgcccagtaccaccacttccgccaccgcctgccgctggcgcgcgtgcgcctggtggaggtgggcggggacgtgcagctggactccgtgaggatcttctgagcagaagcccaggcgggcccggggccttggctggcaaataaagcgttagcccgcagcgcgactgtgtctgtgtcccattcactgagatgagcaaactgagacccagagaggccaagatactggctccgggccacacagcgaatccgaggcggaggcgggctctgagcctgcctgtgcttaggacactttctgtctgcgaaggcgtgagggtcgcgatctgggaaggagtgggtgtggggcgtgccctgacgcagcatttgtgcaaagcaagccagctgggaatgcggtcgggcggacctgctggcgtttggggcgcagaggcgctcaccgcaggtcctggtgcccccactgcagatctaaggggcgccaacatgggtccatctgcaaagggggcgaatgagtcccacctttctggtcatttgtgggccccaatcctacgggtggaaagcgtgttataagatcccgggtccctgggtcccgtatccccctgcagctcatctctcccaccctcttctctcctggcctcccgcccctagagacgtcccaggtggggctgggaagcccgacgggcgtctccgggctcccgctgttccccgagtcgggacaggtacccgcctgcgcaccctcggggcagacgcgatggcagcggccccggctctgcggaacagctgggaggactcgaaggacggcgtgggttttccctggcgcagcgagccccattcccacgcgccctccgctctccccgacggcccggaccccggtcctagccctggtcactgtgacgggaggggaagcggacgccaagtgcagccccggccccagtgtgactttcagggttcagggcgtcgctggggcttcccttaatggcggggttggggtgggagaggctgggagcactgtgcgcctcgagcccccaccctcggcgaggcaccctgcagcggtcgcgggtctctcaaccggggaccgaggagccaggccagggctgcgatcggaagctgcacgtgggtgttcagggccggctgttccggaaccttagtgcagagccacatcttggtgggcgcgccaggccttgggtctcgatccccgcccttgagcctccgaccccctggcgtccgccttccgcattgctgcctggaccaaggcggatgcaggaagctggggtggttcctggcctggcctgaatctgattctggagtcaggtggggacgccaggttcgctgcaggtcccaggcgcattcaggacccggggttttaggcccctgcgaccttcggtctgggcggtcccttcccgtgtccggccctggagtgggtgggcggtggccaggagcgagcccagctctggtgaggaggcctgtgagaggccggtttctcccagtcctccggggctcctgcttgaatgagttcgctcttatttcatttggctgtgtcgagtgtttttaaaatatcagttttttcataaagataatatatgcatctggtatacatttcaaaacatacagtgaaatgaacacacattattggcacaagtggtgaatgtggttgggtcttcggattagacagtagcgatccagccgtgttaatgtcctgaatttcaccgttgactgacagtgtacatgtgggaacttgtccctgtttgtggaaaatagagttaggtatttggtggtgcagcatgtttgcgacttattctcaaatggttctgaggcaggaaaatagggtctggaggcagggaacataaggctgattcacacttcagctatgacaggaaacatcctctccatttacatagggcgtacagcaagtaaccaatggaaacctctagaaggtatttaaatgccaaaaaattatgtaacccagcccttgagcccctatgctccgccgcacccacactgtggggtgtatttttattttcaataaatctctgcctttgttgcttcattatttccttgctttgtgcgttttgcccaattcttcattcaagagaccaagcacctggacaccctccatcggtaacagttcatcaaaaatttttaaataaaaaattttttttgttgaggcagggtcttgctctgttgcccaggctgagtggagttgtggataagggcttactgcagcctcaacctcccaggctgaagccatcctcccacctcagccccccaagtagctgagactacaggcacgtgccatggtgccaggctaatttttttggggggggcgggtgtttgtagagccagggtcttgctatgttgcccaggctggtcttgaactcctggactcaaactcctgagctcaagcgatcctcccaccgaggcttcccagagtgctgggattacaggtgtgagccatggtgcccaacctaaatccttctttattaagtttgtcttcaaagaaatttagaatttatgattcagcttcccttctctcctccccatcctcctggatctttctgtaacagctctattgacatataactcatatgctatacaagtcacccattcaaagtatacaagtcaatgtttttcagtatattcacaaggttgtgcatccatcaacacaatctaattttagaacatttttatcatctcaaaagaccttggctcacagatgtaatcccagcactttgggagcctgaagcggaaggattgattgagcccaggagttcaagaccagcctgaggccgggcgctgtggctcacacttgtaatctcagcactttgggaggctgagatgggcggatcacttgagctcaggagctcgagactagcctggccaacatggcaaaaccacatctctactcaaaatacaaaaaattagccaggcgtggtggcacgcacctgtaatcccagctacgtgggaggctgaggcaggagaattgcttgaacccggtaggcggaggctgcagtgagcagatagcaccattgcactccagcctgggtgacagagcaaagctctgtgtcaaaaaaaaaaaaaaaaaaaaaaaaaaacaacctgggaaatatagggagacctcatctctacaaaaaataattttagctgggcatggtggtacacacctgtggtcccagttactcgggaggctgagctaggaggatggcttgagctggagaggtcgaggctgcagagagccgtgatcgctccactgcactccagcttgagcaacagagtgaaaccctgtttcagaaacaaaacaaaacaaaaaagaacaactaaaagaaaccccatacccataagcagtcactccccaacttgcccctcccccagcacctggcaatcactaacctactttccagctgtatggatttatgaatctgcttgttttccacacgtggaatcatacaatatgtggccctgtatatctggcttcttccacggagcatcatgttttcagggtttgtccatgtcatagcatgcatcagcacttcattccttttcatggctgaatgctgttccaatgtgtggatcgaatatacgcgtttacccattcatcatggtgaataatggatatctgggttgttcctacatcttggctattatgaataatgctgctatgaacctattgtgtgaacatgttttcatgtctcttgggtaagtacctaggagaatttctgggtcaggccaggtgctgtggctcatgcctgtaattccaccactttgggaggccaaggcagatggatcacctgaggtcaggagttcgagaccagcctgatcaacatggaaaagccccatctctactaaaaatacaaaattaaccgggcgtggtggtgcatgcctgtaatcccagctacttgggagactgaggcaggagaatcgcttgaacccaggaggtggaggtttcagcgagccgagatcgcaccactgcactccagtctgggcatcaagagcgaaactccgtctcaaaaaagaaaaaaaaaaaaagaattcctgggtcacatgactcttttaagttccgtttcaaagaactgccaaaccattttccaaagtaactgtaacattttacattaccatcagcaacatatgtgttcctatttctccatgttctctccaacacttgttattgtcttttttttttttttgagacagggtcttgttctgttgtgtaggctggagtgcagtggtgaaatcatggctcactgcagcctccacctcctgggctcaagcaattctcctacctcaggcctcccaattagttggaactataggtgtgcgtccccatgcttggctaatttttaaaaattttttgtagagacaggttcttgctatgttgcccaggctggtcctgaactcttagcctcaagtgatcctcccaccccggcctcccaaagtgctgggattacaggcatgagccaccacacctgacctatctgtcttttttattatagccatcctaataggttggcttcaccacttggtgaagagatatgtcatgtggttttgatttgcatttccctaatgacatgggttgccgtttatatatcttctttgcagaaatgtttatcgaaattttctgcccattttaaattggatttttaaaaggtgttatataatcttatccataaatatgtgtataattctaaatgatatttattttttaatttttatttttgagatggggtctcactatgctgcccaggctggtctcaaactcccaggttcaaacagtcttcccaccttagcctcccaagtagctaggattacaggcatctgccaccacgcctggcaggctctctttttaaacaaaacctcattaccattctaactcctaaaaaatttacagttcatatcattgtatgatacaatgtttgcaaagtttgtatgcaaaggtttcccccaacattttattatgaattttttcagacatgcagaaaagttaaaagaattattctatgaatacctcatataccctaaccagattctatataacattttactcaacttgctttatcacacatagatccatctatccacccttctatccatccatcaccatcttctttttttcttttcttcttcttctttttttttttttttttgagaggagtctcactctgttgccaggctggagtgcagtggcgcgatctcggctcactgcaacctctgcctcccaggttcaagcgattctcctgccccagcctcccgagtagctgggattacaggcacccaccactatgcccggctaattttttgtatttttggtagagacagagtttcaccacgttggccaggctagtctcaaaaattcctgaccttgtgattcgcctgcctcggcctcccaaagtgttgggattacatgcgtgagccaccacacctggccaaaaaatatggaacacttcacaaatttgcatgtcatccttgcgcaggggccatgctaatcttctctgcatcattccagattttagtatatgtgctgctgaagcgagcactatttctttattttattttaatattttgtatttttgtatttttgtattttttttttattgatcattcttgggtgtttctcgcagaggggggatttggcagggtcacaggacaatagtggagggaaggtcagcagataaacaagtgaacaaaggtctctggttttcctaggcagagtgtgtgtgtccctgggtacttgagattagggaatggtgatgactcttaacgagcatgctgccttcaagcatctgtttaacaaagcacatcttgcaccgcccttaatccatttaaccctgagtggacacagcacatgtttcagagagcacagggttgggggtaaggtcatagatcaacaggatcccaaggcagaagaatttttcttagtacagaacaaaatgaaaagtctcccatgtctacttctttctacacagacacagcaaccatccgatttctcaatcttttccccacctttcccccttttctattccgcaaaactgccattgtcatcatggcccgttctcaatgagctgttgggtacacctcccagacggggtggtggccgggcagaggggctcctcacttcccagtaggggcggccgggcagaggcgcccctcacctcccggaccgggcggctggccgggcagggggctgaccccccacctccctcccggacggggcgtctcgcctggcggggggctgacccccccacctccctcccggacggggcggctggctgggcagggggctgactcccccacctccctcccggacggggcggctggccgggcagaggggctcctcacttcccagtaggggcggccgggcagaggcgcccctcacctcccagacggggtggctggccggggcggctggccgggcggggggctgacccccccacctcccttccggacggggtggctgccgggcggagacgctcctcacttcccagacagggtggcagccgggcggaggggctcctcacttctcagatggggcggttgccaggcggagggtctcctcccttctcagacggggcggccgggcagagacgctcctcacctcccagacggggcggcggggcagaggcgctccccacatctcagacgatgggcggccgggcagagacgctcctcacttcctagatgggatggtggccgggaagaggtgctcctcacttcctaggtgagatggcggccgggcagagacgctcctcactttccagactgggcagccaggcagagggactcctcacgtcccagatgatgggcggccaggcagagacgcacctcacttcccagacggggtagcggccgggcagaggctgcactcttggcactttgggaggccaaggcaggcggctgggaggtggaggttgtagctgagatcacgccactgcactccagcctgggcaccattgagcactgagttaacgagactccgtctgcaatcccggcacctcgggaggccgaggctggcggatcactcgcggttaggagctggagaccagcccggccaacacagcgaaaccccgtctccaccaaaaaaatacgaaaaccagtcaggcgtggcggcgcgcgcctgcaatcgcaggcactcggcaggctgaggcaggagaatcaggcagggaggttgcagtgagccgagatggcagcagcacagtccagagggagaccgtggaaagaggagagggagagggggagggggagggggagggagctattttgtatttttttagaaacagagttttgctctgttgtccagactagagtgcagtggcctgattatggttcacggcagcgttgaactcctgggcacaagccaacctcctgcctcagcctccctagcagctggaactacagatgtttgctacatctggcttacttttttattttttgtagagacagggtctcgccatgttgcccaggctggtcttgaactcctgggctcaagcaatcttcccacctcgtctcccaaagtgctgggattacaggctcatgccatcgcacccagccatcattttatttacttatccattcgaagtaaattgtaaacatcagtatttgtcacccctaaacatttcagaagtacatcattagctagagtacaatatttgtttatgattctttccttgtggtaagctttgcggaaagattctttgtttatattggtgaaatgcacaaatctaaaatgtacagttggctgggcacagcgactcacgccggtaatcccgacactttgggcggctagggcaggagcattgcttgagcccagggagtcgagatcagcctgagcaacataaggagacccccgtctttataaatatatatatttttaattagctgggcatggtggtgcacacctgtggtcccagctacctgggaggctggagtgggaggatcacttgagtcccagaggttgagcctgcaatgagctgtgatcacaccactgcactccagcctgggcaatagagtgagatcctgtctcaataaaaacaaaaataaaaagaatttaataaaataaaatatacagccaatgagttctaacaaatgcacagagctgtgtgacctagggtatggaacatatccatcactccagaaagttgctttagacatgcaaacatttaaacttagtttgagtcatgctaataaccggttttacagcattttatccaattaataatatagagggtttaattcgtcacttcatggtttgtcctgaagcttgctaacccattacatcagaaagccaacccagctaatttgaaagtggatgagtcagtgactggtgaataagtaaacacgagagtgaataaagaatagatggatgaatgaaaatgtaaagaaatcagctgggggcagtggctcacgcctgtaatcccagcactttgggaggccaaggtgggtgtatcacgagtcaagagattgagaccatcctggccaacatggtgaaaccctgtttctactaaaaatacaaaaattagctgggcatggtggcgcatgcctgtagccccagctactcaggaggctgaagcaggagaatcacttgaacccatgaggcggaggttgcagtgagctgagatggcaccactgcactccagcctggcgacagagcaagactccgtctcaaaaaaagaaagaaaaaaaagaaagaaatcaatgaatgggccaggcacggtggcccacgcctgtaatcccagcactttgggaggcggaggcaggcgcaccacctgaggtcaggagttcaagaccagcctggccaacatggcaaaaccctgtctctactaaaaatacaaaaattagctgggcgtggtggtgggtgcctgtaattccagctactcaggaggctgaggcaggagaattgcttgaacgggagatggcagttgcagtgacctgagacagcaccattgcactccagcctggatgacaagagcaaaactctgtctcaaaaaaaaaataaataaaaataaaaacaagaaatcaatgaatgatgaaatcagcaaaagagtgatttgatgaaagcatggttgggtggacagatggagagaagaaaatataaatgaatggataactttccagcttgagttggaaaagggttggaaaaaaatagataatgaagagatgaatggataattggatagaaagagatggaaaagtgatgaattgctgaatggagggatgaatgggcatatggaggacaaatggatgactgtgatggaaagcagagaattacatggacaaatggagggatgaataaatgaatggatggacgaaagttagacttcgtaaggatggctgaatgaatagacagatagactggtatatggttagatgtttggatggatggagaagatgatggatgatcagatgcatgggtgatggataaaaggttgaatgaaagaatggatggataaacagctggatagagctagacagactggtgagtagatgaatagttgcatgtttggatgaatgggtgaacatatggttgactggatgtttggagagattgacgatgagatgatgagtgcagaggtaaatggatgggtagatggataaagggttggatgaaaggatggttgaacaatcagctcaatggatggattgatgaggtctagatggttggatgtttgattgatggatggttggatggacttttggttggatacatggagagattgatggatgttgggatacacgagtggagagatggatgcatggatggatggaacgacaggctgtatagtggttaagtgtgcagatccttgggagccagatcagctggatttgaatcctccttctgccatttatgcaatgtataatttgggcaatttgttttattttcctttgtttcctcatctgttacagagggatgataataattgtttctacctcttggggttgctgtgagaagtgaatgagccctaaatcagtgcttggggcataaccagatttatgatgacaggaggatggatggtcagatgactggatggatgaaggatagatgaagtgcatgactgaaccaaggaagggaagagtagccggggagcagatggagacacacactcatgagacaccctcagacattttattaggggcttagaaaggagtcctaggggataattctgttttcccatgagttatggccccaggaatagattagatctggacataggacaaggtgacatcaccctggatttccaatgtgtccaccctctggaaggccgagaggcgatgggcaaagtcaaagaggtgctggccattggcgtaaaccttgaagcgatccaagccacagcgaatggacagctgcagggagaagggtgggcatgaggccagggccaggactgaggccctggaaggaagtgggaaaagagagctcagactcacatcaaagaactgtccgggaccaaatgggttgtgggtgatcttcttctcctcggatccccacgagccattcagaaggctgttccggaccacggtaccgttgcccatgcggggattaatgtgcagagctatgtcccctgaggagcccaccttgaagttgatagcaaagctggggacagagagggatgggggagtcagatggagtccagtgggaagaggccagtgggctggacctctgaatccctaaaggaggaggggacagagggtctagattgttgggtctgagggaggagggggctgggggttcccacctagtttacgttatacctcttgcctgtgggaggcacatagcccttgatgatgatggttcttcgagctgtgagccctccttgcagcctcccgaaatatggcacaggctgtgggaagagaacggggggtcccattctctctcagcttagcagagccagatgtgggaagaaattttctttttcttttcttttctttcctgtctttttttcttataagagatggggtcttactctgtcacccaggctggagtgcagtggcatgatcaagcctcactgcagcctcaaactgctgggctcaagcaatcctcccatctcagcctcccgaagtgctgggattacaggcgtgagccaccacgcccagccttgcaggaacaaaggaacaaattttgtttttttttttaggcagagtctccctctgacgcccaggctggagtgtagtggcataatctcagctcactgcaacctctgcctcctaggttcaagcaattctgctgcctcagccttcctagtagctgggattacaggtgtgcgccaccacacctggctaacttttgtcattttagtagagacggggattcatcatgttgaccaggctgatctggaactcttgacctcaagtgatccacctgccttggcctcccaaagggctgggattataggcatgagccaccgtgtctggccaagaataaattttctttttcttttctttttctttttttttttttttttttttttttgagatggagtctcgttctgtcaccaggttggagtactgtggcacgatcccggctcactgcaacctccgactccctggttcaagcgattctcctgcctcagcttcctgagtagctgggattacaggcgcgcgccaccatgcccagctaatttttgtatttttagtagagacagagtttcactatgctggccaggatggtctcgatcgatctcctgacctcgtgatctgtccgccttggcatcccaaagtgctgggattacaggcgtgagccaccatgtccagcccaagaacaaattttctgagaggtcccactcctcctggaaaacatccccaattccttctgctccctaaacctgaccacgaactctatctacccttcccctacctcccaccccaaaaccctcagcccactccctttctggctgtctcagattccctggagatccgtgccccctccccaccatccatctctgtttccccaagccataccgggttgaaggttgggggtccttccatggtctgtgaagtgaggaagaagcgatattattctccaagagtcgacagatatctatgacacacccattagactccggcgtttctctaggtgctgggttagtacaccttgggctgcaacccctcttagctccccctaccccaattctcaccattcccactcctcacccggggccctcccagccctcccactcacgggcaggctgttcagctgttgatggcaatgtccgggaccctgaacgatggacagaaggcaggaagggtgagaggggctgagggaccccactagggaggaagaccctcacctatcagcaagtacttacagggtaaggtggcatcatcgggggtccctgtgggcacagaaagagaaagcggttatgagagggtccccagatttgcgactgaaagatgtcgagagtgcctgccctggggtggcccaccaccaccaccactatgccagagaactctggcatcaaagggtggcaccccgatcacagattcacggagaggggcaccccatgttctgggatcgctgatgcccagtgagtcaccccaaagctttaggacaatgcttggtccattttgttctctgtgcccttccccttgctgtcttcctgctgtcccggggccctcactcgctgatcttgatctcagtttctgcctctgtccctgtgtctctgcctctctctctgtcttggccacacctcagcgcaggggcttccttctgccaaacacttttatttatttatttgagatggaatttcgctcttgttgcccagggtgccgtgcagtggcacgatctctgctcacctcaacctctgcctcctgggttcaagtgattctcctgcctcagcctccggtgtagctgggattacaagcatgcgccaccacgcccagctaattttgtatttttaatagagatggggtttctccatgttggtcaggctggtctcaaactcccgacctcaggtgatccgctcgcctcaccctcccaagtctaacacctttaacttttactctctctctttctctctgttaccttctcttttctcctccttgtaattaactccattctgccttgacttctattctcagccagctattctgaaggccttttaaaagtagctttatatagccgggcgtggtggcaggtgcctgtaatcacagctacttgggaggctgaggaagaattccttaaacctgggaggcagagggtgcagtgagctgagatcatgccactgcactccaacctgggccacagagcaagactccatctaaaaaaaaaacaaaaaacaaaaaacaaacaaacaaataaacgtagctttataagccgggggctgtggctcacgcctgtaatctcaggactttgggaggctgaggtgggtggatcacctgaggtcaggagttcaagaccagcctggacaacataggaaaattcctcccctctgtctttacaaaaaatttaaaaactagctggggctggtggtgcgtgcctgtagtcccagctactcaggagactgaggtgggaggatcacttgaacccaggaagtcaagaatacagtaggctgtgattgcaccaccacactccagcctgggtgacagagccagaccctgcctcaaaaataataataataataataataataataataataataataatattgataaactcaatttaattgtatgttatttatttttaatgattgtgttaagcaacctctagggaattcattcactatcgtgtgttctttgcctttccttatcctcactttctgactcaccttacacacttcctcctactccaggaagcacttccttcctgacccatgactagtcaagcccttcctgtaggctcccaaacctcctgtatactccatatcccagcccctgcccctctgcctgtgccctccctatcacagacctgaccatttctgggctgtcactctctgatgccatgtctgtgagcccagtgaggtcagggcccagagatatctcagtcattcctgtctccagccctgggcctgacccctctgcctgcctccacccaccctcctgtcctggccctgatccctctgtctgggcccaaacccaactgcaacccttcagccagggcctccccatcccggcctttatcccttgcagtgatgggtctgtcttcccagtgggatcccttgatcatcactgggctcttggcataactcagcagagggagatgcttgggaaataaatgaatgtggaatgcgctgggcaccatggctcacacctgtaatcccagcactctgggagactgtagccagcagatcacttgaggccaggagttccagaccagcctggccaacatggtgaaaccccgtctctactaaaaatacaaaaattagccagatgtgatggtgggtgcctgtaatcccagctacttgggaggctgaggcaggagaattgcttaaaactgggaggcagaggttgcagtgagccagaatcacaccactgtactccagcctgggagacagagcaagactccatctcaaaaagaaaaaatagaccaactgcggtggctcacgcctgtaatcccagcactttgggaagtcgaggtgggtggatcatgaggtaaggagatcgagaccatcttggctaacacagtgaaaccctgtctctactaaaaatacaaaaaaattagccgggcgtggtggcaggctcctgtagtcccagctatttgggaggctgaggcaggagaatggcgtgaacctgggaggcggagcttgcagtgagccaagatcgcgccactgcactccaacctgggcgacagagtgagactccgtctcaaaaaaaaaagaaaaaaagaaaaaaagaaaaaaaatgaatgtggaactgaatttagaaagaaaggacgcaagaagggatgggacccctcacacctggggccggaggggctggcctccgatgaagttgattgattgaagttgcagatccccatccacttgcaggtgggtgaccatctgtaggggaagccggtgcccgtactcatagaagggatttccatttaccaccacctggagggcagagatgggaggtcaggagtcagcacccatgatcctgggaaggtacaaacaggaagcaagggcagggcaccctggctcacgcctctaatcccagcactttgggaggctgaggggggtggatcatttgagatcaggagtgtgagaccagtctggccaacatagtgaaaccccatctctactaaaaatacaaaaattagccaggcatggtggcgggctcctgtaatcccagatactcaggaggctgaggcaggagaatcgcctgaacccgggaggtggaggttgcagtgagtggagatcacgctgctgcactccagcttgggtgacagagcaagactctgtctcaaaaaaaaaaaaaagcaaggatcagggatctttttcattgggagtcgatagtcttggggatgagctgggacagcctcagcatcaggaaccttggagtccacagctcagaggtcaagctaaggtcaaaaatcagctcactggccgggcgcagtggctcatgcctgtaatcccagcactttaggaagccaaggtgggggatcatttgagatcaagagttcgagaccagcttgagaaacatagcaagaccccgtctttacaaaaatatacaaaaattagccgggcgtggtggtgtgcacctagagtcccagctactccggaggctaatgtgagaggatcacctgagcccggggaggttgaggctgtagtgagctgtttgcatcactgcactccagcctgggcaacagagcgagacccagtctcaagaggaaaacaaaaagtacacgttttgcaaaaaacacaaagtggtaggaggaaatacacatgaaatgtattacaagactctcagcagtagggtaatgggactaaggaaaagcgctaaaagaggatttttaaaaataggcaggaaacggccgcccttcgtctgggaggtgaggagcgcctctgcccggccgccccgtctgggaagtgaggagcgcctctgccaggccgccctgtctgggaagtgtacccaacagctccgaagagacagcgaccatcaagaatgggccatgatgacgatggcggttttgtcgaaaagaaaagggggaaatgtggggaaaagaaagagagatcagattgttactgtgtctgtgtagaaagaagtagacatagaagactccattttgttctgtactaagaaaaattcttctgccttgagttgctgttaatctgtaaccttaccctgtgttccctgagacatgtggtgtgtcaactcagggttaaatggattaagggctgtgcaggatgtgctttgttaaacagaggcttgaaggcagcatgctccttaagagtcatcaccactccctaatctcaagtacccagggacacaaacactgtggaaggccgcagggccctctgcctaggaaaaccagagacctttgttcacgtgtttatctgctgaccttctctccactattatcctatgaccctgccacatccccctctctgagaaacacccaagaatgatcaataaataaaaataaataaataaataaataataaaataaaataaaataggcaggaaagaaggaaaagaaaagaaagaagttgacataaaaagtggggatggaaaaaggaaataaatgaaggagggaaggagagagaaggaagaagagaggagggaagggggaaggaaggaggggaggaaagaggagagaacagagaaagaggaaggaaaaagaggaaaaagaaggaaggggctgggtgtggtggctcacgcctgtaattccagcactttgggaggccaaggagggcagaacacctgaggtcgggagttcgaggccagcctgggcaacatggtgaaaccccatctctactcaaaatacagaaattagctgagcgtggtggcacgcgcctataatcccagctactcgggaggctgaggcaggagaagctcttgaacccagcaggcagaggttgcagtaagctgagatcatgccactgcactccagcctgggcaacagagtgaaactccatctcaaaaaaaaaaaaaaaaaaaagaaagaaagaaagaaaaggaaggaaggcgggaaggaaggaagcagccaagatggcgccactgcactccagcttgggaaacaagagagaaagcatgcagaccttgtagtgctcagccaggactatgaagaccagctcaaaggcggcaccctttttgaagggcatgctcctcttcctctcctcgctgccccacttcccgccctgcaacgtgttgaagaccaccttgtcccagccgtcaaaccgcggattgaagtggaaggcgacgtctgagcccggatcctgcccaaccacaaagttcacgaagaacctggcgggacacaaagggctcattcccctggtgccacctcccggggcctgggggcctcctccaggaagccctctccctgccgccctgtcctcggcctccctggcccggacctcagcaccagctctgaggggcaaccttggcactgtgggccacagcgtggagaggacctgagttctgaggggggcagattcccaccaccacaccttcgctcacagcctttccttctttttttttttttttttttttttgagatggagtcttgctctgttgcccaggctggagttggagtgccgcgatctcagctcactgcaacctccgcctcctggattccagtgattctcctgcctcagcctcccaagtagctgggattacaggcgtgcaccaccacgtccggctaatttttgtatttttagtagagacagggtttcaccatgttggccaggctgatctcaaactcctgacctcaggtgatccacctgcctcggcttcccaaagtgctgggattacaggtgtgagacaccgtgcctgacattttttttcttgagacagggtcttgtgttctcaccctgtcccccaggctggagtacagtggccacgatggtggctcactgcagcctcaacctcctgggtcaactgattctcctgcctcagcctccctagtagctgggactacaggtgcatgccactatgcctggcttttttttttttttttttttttttttgtagagatggggtctcactatgttgccgaggctggtctcaaactcccgggctcaagcaatcctaccacctcggcctctcagagtgctgggattacaggtgtgagttgctgtacccagcccaccttgccttcttagaccacctcctccaccctcttcccaacttccagttatgactgttacaagtctgccacgggccaggccctgtcctatgcactttgggtctccctgctcccctcctggccctgaagatcatttccctcatgcagccagagggtccctgtgtacacccatgacgcatcatattccgcacccctgggcacaccagcatccttgaaattactccccaggacaggcctgtctcagggcctttgcactggctgttccctctgcctggaaggcccttccctcagctgtccctggggatccctctctccgttccttctgttctttgctgatatgttcccttcccaggcaggccttctctggccacctttttaatttttttgagacagtctccctttgtcacctaggctggagtgcagtgatgcgatctcagctcactgcaaactctgccttcaggattcaagtgattctcccacatcaggctctcaagtagctgggattacaggcacctgtcaccatgcctggctaattttgtattttcagcagagatgagatttcgccttttttttttttttttttttttttttgagatggagtctcgctctttcgcccaggctggagtgcagtggcgcaatcttggctcactgcaagctccgcctcctggtttcacgccattctcctgcctcagcctcccgagtagctgggactacaggcacccgccaccatgcccagctaattttttgtatttttagtagagacggggtttcactgtgttagccaggatggtctcgatctcctgacctcgtgatccgcccgtctctgcctcccaaagtgctgggattacagacgtgagccaccacgcccagccagatgcgattttgccattttggccaggctagtctcgagctcctgacctcaggtgatctgcctggcttagccacccaaagtgctgggattacaggcgtaagccaccatgcccggccaggccaccctatttaaggggacaatttaaagggaacctctgtccgcacatacactccccatctcccttccctcctcattttcttcatagcacttaatatcatctgacatcttacatatttgactttttttttttttttttttgagacagagtctcactcttgttgcccaggctgtagtgcaatggcacgatctcggctcaccgaaacctccacttcccaggttcaagtgattctcctgcctcagcctcctgagtagctgggattacaggcatgcgccaccacgccctggtaattttgtatttttagtagagacagggtttctccattttggtcaggctggtcttgaactcccgatctcaggtgatctgcctgcctaggcctcctaaagtgctgggattacaggcctgagctaccgcgcccggcctggacttattttttatgtttcccctactaggacatcagctccacgagggcaggggtctctgtcctgttcactcctccatccctagtgccaggacacagaataggcactcagtgaagaagtaaacaataaataaataaacaacaggctgggcagagtggctcataccagtgcctgatcctcccagcactttaggaggccgaggctagaggatcgcttgagcacaggagttcaagaccagcctgggcaacataacaagactttgtctctacaaaacaaataataataataaataaaaattaaaaattaaattagttgggcatggtggcacatgtctgtagtcccatctgcttggaaagatgaggtaggaggatcactttagcccaggagttggaggccgaagtgagctataatattgtgccactgcactccagcttgggcaacagagcaagaccctatctctaaggaaaaaaaaagtcctatgaggccaatcattatcaacgtgttaaggccctttttaaaaagctaagactgggccaggcgcagtggctcacgcctgtaatcccagcactttgggaggccgagatgggaggatcacttgaggtcaggagttcgagaccagcctgaccaacatggtgaaaccccatctctactaaaaatacaaaaattagccagtgtgctggcacatgcctgtaatcccagctactcaagaggctgaggcaggagaatcgcttgaacctgggagacagaggttgcagtgagccaagatcatgccattgcactccagcctgggcgacaagagcaaaactccatctcaaaacaaaaaaaaaaacaaaaaaaacaaaaacagaaaagaaaagaaaatgaagcacagagaggtatagtcactttcactctttcaccaacacagagctggggagtggcagagctgggattttaactcggggacccggctctgagcctgtgatctgaattcctgccattgcacccatcagcttcagtctaatgtccaactcagggactgcctctcacggtgagccctccctgaaccttctggcccccacgtccccactcctgatctgccccagattcatctctggctattgggtggggcagaaaaagagtcccctctccaccagggtggggtaagggcagaaagcccccaacagccaggcccagagcacccagttggaagtcccctgccagcccggcctggcttggggagggtcttaccgcttcatgtgctcgctggccactccttggatgtaaacagacattcccacgttgagcccgcccgggatgggctggtagtaaggcagcgtctggagaagaggcctggtgaggggactcacaagccatctgcctgttgcagcctttacccctcccagaaaagccccccagtcccttaagcaggagagaggaaaccatgggggaggaccaggttgaagatgacgagggccaacagttagacgtggacacagacagcctgaggtcagggtaggagtaaatcgagggtcggggtcagctttgggtaaatcagaccacagagtcagatggggccccccaggatcagagtggggaaaattggtgtgagggcttatggacggagctgcgggcggagtggggcctgagctggcatctcaccgggttgtaggtgggctggtagcccggtgcggggacataggccatcgctcgaggctgcgctagtggctggtcctgtgagaagagctgcaggagtgggagatggtggcggatggcaggcggtggtggctcttatacccagggtaagggagtggctggcaggggagggtccacagggctcctcttctgggactctcaggctgtcggcttctcctagagcgcaccctagtctcccttcccttgccagcttccctggtgaccagccaggacccaaatcacctgggtcccctcccctacgccctcctgcaaagaggaagtgctcatgaacttcggccctgccagggccttatcagagcccataaaaccctgcccagacttctgttggcagagggagggtgagaccaggcagggcagggcaggctgcaggaatgacccaggacaggtgggcagcggaggaggagaacgcggaggaactgcaaattcctgcctctcccagcaactgtgaagggacctacgttgattgcgtgcccaccacacatctttaccacgtatgttgtattgtagggagagtggtttagattactagtgtgtggagccagaggttctaggttcaaatcctgcctttgccacttctcagctgtatgatcatgggtcagtgccttaccctcaatttgcccatgtgctcatctgtaaaatggggatatagtagtatcggctgggtgcagtggctcatgcctgtaatcccagcactttgactggccgaggtggatggatcacctgagggcaggagttcgagaccagcctggcaaaatcccagtctctactaaaaatacaaaaattagccaggcatggtggtgggtgcctataatcccatctacttggaggctgaggcaggagaatcacttgaacctgagtggaggagagtgcagtgagccaaggtcacgccactgcactccagcttggatgacagatggagactctgtttcaaaaaaaaaaaaaaaaaaaaaggaattcataagagaggaaacaagtattgaatagctatcaaaatattttaaaaatgaatttgtgatccagtaatgcctgtatgttattaatctgccaaataagttctagctgtgggtccaactgccactcagaaaaataaataaataaagaaaagagtagtatcaaccttaggctgggtgtggtggcttgtgcctacaatcccagcaatttgggaagctgaagcaggaggactgcttgagcccaggagttcaagaccagcctgggcaacatagtgagacccccatctctacaaaaataaaataaaaattagctgggcatggtagcacacatctgtattcctagctactcagaggctgaggcaggaggatcgcttgaacccaggagttaaggttacagtgagctatgatcatgccactgcactccagcctgggtgacagactaagagtccgtctctaaaaatagcaacaataatagtcataataataataatcataatagtatcaacttcatagagtccttgatcattaagataataaatgctcagaacaggacatagcatatagaagtcattaacttaatgcttggtctcttgcagtcattccaaacataaatccggaagattgggatgatatatggataaaaaatcccaaagttttgtttgctcatttttgagacagagtcttgctctatcacccaggctgcagtgcagtggcaccatctcagctcactgcaacctccacctcccaggttcaagggattctcctgcctcagccttctgaatagctgggattacaggcttactccacgcctggctaatttttgtatttttagtagagaccaggttttgccatgttggccaggctggtctcaaactcctgacctcaagtgatccacctgcctcaacctcccaaagtgctggaattacaggcatgagccactgcacccggccagaaaccccaaagtccttttttgttttgttttttctttttttgagacagagtctcactctgtcacccaggctggactgcagcagcatgatctcagctcactgcaaactcacctcctgggttcaaggattctcctgcctcagcctcccgagtagctgggactagaggcacctgccaccacacctagctaatttttgtatttttagtagagactgggtttcaacatgttgactaggctggttgcaaactcctgagctcaggcaatccacctgcgtcagcctccaaaagtgctgggattacaggtgtgagacgccagcatcagatcccatgtgctgtgcagtgagaggtgccaggcagggcacgaacgccaccctcaaccccagggcaggcagggagaccaggaagccttgcaacccagagggaccccagcgacttttgctcactccctccgccccggaattccttgtgcccctcgcctgcccgctgccagtctgaatggccatcacctccatgccacccattcccatgcatccaacctctagccccagccttcaggactgcagtctctggagcccctaggtgcatcccagcccctcccacctctcctctatccaagaagggcaccaggttctttactttgctttattgtttgtggggtgaagataaggccttgggcttgagaaactcattgtcataaagttataaactgggaaactgggtcagaaggcatagaaacaactgtcatcgcccatcctccctttctgtggatgaggcgggacaaggccggccccctggctggggcctgggacgcgagggctctcagagcttggagaaggtgacggttttcagttccttgttctcagtcgtggcctggaccgacttcacgaggtcttgggtctgcagcatgctcatgttccaggacgcctggtaccgagggtgttgagagagaacgaggagagagattagcaggggccaatcaggataaagcatgagagcaccctgcaccctggttggtcgcctggggttagaggagggctgtgattggtcggagcgtgcaccttaccacgtagttgaggctctcggccaccgaatggtcgcgggaatacagcaggttgaccttggtgctctgcaccgccacggggctcttgctggaaatctcggccgccagcgctaaggcagcatccagcatgacctctttgtctgggaacacccggctgcagtgaaagagatcagggaccgggtgggctgggaagggctctctcctccagcctcccgcagatgaagaagtggccactcacagaggaaggcccaagaccccagagaaacagcccaatcagagcagggggctgaccccacaataaagaaatgagctcaccaagaaaggatgccactaggaattctagagcgaggagacaaggggacccggagaggcctccaaccctccaggcctggctgcccccagcactgagctaccacggccatggccctacctgaccagcccactgcccagggcctcgtcagccatcatcttgcgggcggtgaaggccagctcgttgaccaggctgcaaaggcaagcgtgcatcaggaggcggctgccaccccggggctgggagatgctctggggtctcctgcccacacccccacaccccctgcacccacctctggttcccgatgaccttgggcaggcgctgcagtgttcctacatcggcagccaaacccacgtccacctcctgggggaggaatcgggtcagtgtttggtttctgcccaatactgtgcccctcgcaatgtcaacgtccatgaaatttcatgtctactggagagtcccgccccaccttcaccccagtgacttcctccaaagtcccattccattgcccaggcagcttcttgactcaggcaagttccttcaacctagaatagagcccaccttcccactcatgcaccctcccattccctcagggcagctccatctgtgagagaggaaccctcctcaccctacctgagacccctttactgcatcccccggctccatcctgcctcccaccctcaccagtatggccccaggagcaatctctgcctctgacacctgccagcctcaaccccacctcataccttacccactcacaacttcacctcttgacttcctctatgggcaagtcttactttgtcgggttcaactccgactcttccatgaagccctcgaggctcactccaggccccccaacctcaccccactgcccagctctaagcaggagctcgggaggatgactcaccttcacctggaagaaagcatcctgggcacagtaccggatgtcacaggcggtgacaaggtccacacctaggaggtagaggccagggatgctgaatgaccaccagaaccaaccctggctcccgggaggtggggctgcctcttgggacacagtctggcccatgacagagctgaggctggatgccagtggccgcggcatcggagcagcagccccacctggggagcacccgagcaggaggatagccgcagactcacctccgccaatgcagcccccatggacggcagcaatcacgggcttggggcactgagagggaacaggaagagtggggtcagggctggcccaggggaggcgcgtatggagaaagatcccctccagacccctagagtcaccctctcgatgacgttgaaggtctcctggtatcgagtgatgatgtcacggaggtaccagctgatccgggccacatcatctcctttgggctgcaggatgtccgaagccatgtccatcaggtcaatacctggtgagaaggcatgatggagctcatccaggctcccaggccccacccattgactcaaccagggatcagaacccaggcacagcaggttcgaacccccaaaccaccaaggcggaaaaaaaacaactcacacaggacttggtgagggattgattgcatgttgggtgggaaggaaataaaagctaatatttgtggagtcattactcacagaatcctcacagcaaccgtaccagctaggtcctattactatttgtgttaccaatgggtaaactaaggcacagagaggttaagcacttgcccaagggggtcacactggctggtgagtagtgagtaatgaactatttaaattaactcattaatgtttttagagacagggtctcactctgttataccagctagagtgcagtggcacgatcatggctcactgcagcctcgaactcccaggttcaagcaatcctcccacctcagcctcctgagtggctgggactgtgccgaggctgctcttgaactcctgggctcaagcgatcctcccaccttggcatcccaaagcactgggattacacgtgtgagccaccatgccgcatcagaagtaggattttaaaatctggaaccatgcagctggctccagaggccatgcttttccccaagatgccagacagcctgggactcaaggtctgcagcgtgagcaatgcagtcaatggtggtgatgtttcctgagatgagaaacatctcacgatgcagcaatttctgtggctccaacttcaagatgatcctgaatctgacctttcctgcatcagttgttctccatgagcccaccctgctctccctgtttccacctgtgtccccagtctattccctacaggcagccaggggaagccagtggacaccttcttgggtcagatcctctttttttttattttattttttttatttcagacagagtctcgctcttgtcgcccaggctggagtgcagtggcaggatctcggctcaatgcaacctccgcctcccggttcaagtgattctcctacctcagcctcccaagtagctgggattacaggcgcccaccaccatgcccggctaatttttgtatttttagtagagacggggttttgccatgttggccaggctagtctcaaactcctgaccttgtgatccacccacctcggcctcccaaagtgctgggattacaggcgtgagccaccgtgcccggcccagaccctctttttcccacctgtggctcttagaacaaaatggaacgtccttgtcatgactaccctgcatgaacactgttcccaacctgttactttgggcacactggcctccaactctgtgtgtgtgtgtgtgtgtgtgtgtgtgtgtgcactgttcccaacctgttactttgggcacactggtctccaactctgtgtgtgtgtgtgtgtgtgtgtgtgtgtgtgcgggcacgtgcatttgagcccaggagttggaggctgcggtcagctatgatcgcaccactgcactccagcctgggcgacagagcaagaccctggctcaaaaataaaaaataaaaagaaaagaaaatggcaggacagagaggtgaaaagacaagtggaaataggatccagatcactgcctgagggctgtgcagtggtacagaatcttctcattgagaaggtgaccttgagtaaagacccagaggagagggagggagccaaggacctttgggctgacaaccatccctccctcttcaacagccacagactgactccttcacttccttcagctatagctcaaaggtcacctcctagagaggccctccctggccaacctggctcaacgatggccccatcccccgcatcctgaccccgccttacctccgggctgcacagctgctatcctataattaggtccttatctgcttgagggtctgactccctttctagaatgtgagctctgagaacacaggagtttttgtctttctgtccactgctgcatcccctgggcctagcacagggcctggcgcacacgagctgctcaataaatgatcaatacagacaacagtccctgtcctcatggggaggcaaacaaatgaataaaaaagtatattttggggctgggcgtagtggctcacacctgcaatcccagcactttggaaggcagaggcaggaggatggcttgaggctaagattttgagaacagcctgggcaacattgcaagacctcttctctacaaacaatgaaaaaattagctgcacatgaggctgggcatggtcacctgtaatcccagcactttcggaggctgaggtgggcggatcgtttgagcccaggagttgcaggctgcggtcagctatgatcgcgccactgcactccagcctgggcgacagagcaagaccctggctcaaaaataaaaaataaaaagaaaagaaaatggcaggacagagaggtgaaaagacaagtggaaataggatccagatcacagcctgaggccaaagtcccccttactttttttttttttttttttttttttgagatgtagtctcactctatcgcccaggctggcgtgtagtggcgcgatctcggctcactgcaagctccgcctcctgggttcacgccattctcctgcctcagcctccctagtagctgggactacaggcgcctgccaccatgcccggctaattttttacatttttagtagagacggggtttcactgtgttagccaggatagtctccatttcctgacctcgtgatccgcctgcctcagcctcccaaagtgctgggattacaggtgtgagccacggcgcccggcaatcccccttacttttaaccagcatgccagctactcagatgacagacatttagcagctaagagcaaggactctatagccaggcagcatgagttccaaaatcccagctctgccacttacaagctgtgattattgggtaagtttcttgctctctggatctgtttcacctttaaatggggcttatagcagaacctgtcttgtggactgtgattagaattaatatgtttaacgtgcttagaaaggggcgtcacacaccatgagtgctacataattgtggccacctttttctttctctaattagtagttctactctatcactgggtcactgcatgacctgccgtttcttccttctggccttcggggtcttgctgctgaaaataagataagacggccacattcagctgggagctgaaagatgaaggacctgggcccggcacagccacaaaaaagccccatttttctgttctcagacatgatctctatgagagcaaggggtcaggaatcggggctgcttcccgtttccacatctgcagcacccaggagggggctctggcactggactgtgtcactgaatgtttgtcaaatgaatgaacaaatgaacaagaggaggaacagagggagatgcagaaagaaagcaggaggctgggtgcggtggctcatgcctgtgatcccagcactttgggaggctgaggcaggaggatcgctttagatcaggggttcgagaccagcctgggcaacatagcaagccctgcctctacaaaaagtgaaaaaacttgctgtgcatggtggtgcacacctgtggtcccagctacttgaggggctgaagtgggaggatgaggggaggtggtaggggctgaggtgggaggggttgagctcaggaggtggaggctgcagtgagctgagattgctccactgcattccagcctgggtgacagagggagaccctgtctcaaaaatgaaagaaagagagagagaaggaagtgagaggtgacagcatgctggcagcccttgctcgctggcctcagagcccactctggccatgcttgaggagcccttcagcctgctgctgcactatgggagcccctctctgggctggccaagatcggagccggctccctctgcttgcagggaggtgtggagggagaggcgcgggcgggaacccaggctgcacgcagtgctctccggccagcgcaagttccgggtgggtgtgagctcggcgaccccgcactcggagtggtgggccggcgccacctgccctgagcagtgaggggcttagcacctgggccagcagctgcggagggtacaccgggtcccccagcagtgccggcccgctggtgctgcactcgaatacttgccgggcctcagctgcctccctgtggggcagggcttgggacctgcagcctgccatgcccgagcctccccccgccgccgtgggctcctgcacagcccgagcctccccgaggagcgccaccccctgctcggcggcgcctggtcccatcaactgcccaagggctgaggagtgctccgcctgcggccctggtgcaggatccactgggtgaagccagctgagctcctgagtctagtggggatttggagaacatttatgtctagctgagggactgtaaatgcaccaatcagcactctgtatctagctaatctggtggggacttggagaacgtttatgtctagctaagggattgtaaatacaccaatcagcactctgtttctagctcaaggtttgtaaatgcaccaatcagcaccctgtgtctagctcaaggtttgtaaatgcaccaatcaatgctctgtgtctagctcatctggtggggacttggagaaactttatgtctagctaagggattgtaaacaaccaatcagcactctgtgtctagctcaaggtttgtaaatgcaccaatcagcaccctgtgtctagctcaaggtttgtaaatgcaccaatcagcactctgtatctagctaatctggtggggacttggagactctttatgtctagctaagggattgtaaacaaccaatcagcactctgtgtctagctcaaggtttgtaaatgcaccaatcagcaccctatgtctagctcaaggtttgtaaatgcaccaatcagcactctgtatctagctaatctggtggggacttggagaatctttatgtctagctaagggattgtaaatacaccaatcagcactgtgtgtctagctcaaggtttgtaaatacaccaatcagcaccctgtgtctagctcaaggtttgtaaatgcaccaatcagtgctctgtgtctagctaatctagtggggacttggagaagttttgtgtctagctcagggattgtaaacgcaccagtcagcaccctgtcaaaatggaccaatcagctctctgtaaaacagaccaatcagctctctgtaaaacggaccaaccagcaggatgtgggtggggacagataagggaataaaagcaggctgtccgagccagcagtggcaacccactcacgtccccttccatgctatggaagctctgttcttttgctctttgcaataaatcttgctgctgctcactctttgggtccacactgcctttatgagccataacactcaccgcgaaggtctgcaacttctctccagaggccagcaagaccacgaacccactgggaggaatgaacaactccggacgggaggaacgaaccactctggacgcaccgccttaagagctataacactcactgcgaaggtctgcagcttcattcctgaagccagcgagaccacgaacccaccagaaggaagaaactctgaacacacccaaacatcagaaggaacaaactccgaacacatcagaaggaacaaactgcggacatgccgcctttaagaactgtaacactcaccacgagattctgcggcttcattcttgaagtcagtgagaccaagaacccaccaattccggatacattttggtgacccagatgggactattacctatcgccaagcggtgagaccactgcctatcgctgagcggtgagactatcacctatcgccaagcagtgagtaccactggacccctttcacttgctattctgtcctatttttccttagaatttgggggctaaataccaggcacctgtctgccagttaaaagtgactagcatggccgctggactaaagacatgggtgtcaggctttctgggaaagggctctctaacaactcccgactctttggagttgggagcgttggtttgcctagaaccagcttctgcttttcctgtacttctgggctgagccgagggtcgacagagaggaaagccatgcagctctagggtcccgacaagacaacaagttcgttgaccctgcagccatgagcggaacactcaaaggcatgtcgcccaagcgagactcgcccatctatcctatctatcctgactcttgcccccgggtcctaatgcctgccagacaaacttcctctcacctctcttctccgagtttagtcctgcttctaaaatttgctgtctctggtgcttttctagtttctcctataagaacgacttctagaactctgttacattctttaggcacccaggctcaccaatcagaaagacataatttttgcccaaagccctgtcatagtggcgactacctggaattttacgatccctcctcagactaacaggcctaacaaaggtattcctgaagctaggatatggggagcctcagaaattgtagctttcctattcatataagtgaggacaaaaggtgtcactcttccaaccctggagatcccttccctccctcagggtatggccctccacttcatttttggggcataacatctttataggacaggggtaaagtcccaatactaacaggagaatgcttagaactctaacaggttttcaagaatgcgtcggtaagggccactaaatccgaccttccttggtcctccatgtggtctgagaggaaaactagtgtttctgctgctgcgttgatgagcacaactattccgatcagcagggtacagggactgttgcagtttcttgggcagggggagaaacaaaacaaaccaaaaccgcgggtggttttgtctttcagatgggaaacattcagccatcaacaggctcacccttgaaatgcatcctaagccgttgggaccaatttgacccataaaccctgaaaaagaggaggctcattttttttctgcactatggcctggccccagtattctctctctgatggggaaaaatggccacctgagggaagtacaaattacaatactatcctgcagcttgaccttttctgtaagagggaaggcaaatggagtgaaataccttatgtccaagctttcttttcatggagggagaatacacaactatgcaaagcttacaatttacatcccacaggaggacctctcagcttaccaccatatcctagcctccctatagctcccattcctattaatgataatcttcctctaatctcccctgcccagaaggaaatatgcaaagaaatctccaaaggaccacaaaaccctcctggctattggttatgtccccttcaagctgtagggggaggggaatttggtcccacccgggtacatgtccccttctccatctctgatttaaagcagatcaaggcagacctggggaagttttcagatgatcctgataggtacatacatgccctacagggtctagggcaaactttcgacctcgcttggagagatgtcatgctactgttagatcaaaccctggcctttaatgaaaagaatgcagctttagctgcagcctgagagtttggagatacctggaatcttaatcaagtaaatgatagaatgacacctgaagaaagggacaaattccctatcggtcagcaagccatccccagtatggatccccactgggaccttgacttagatcatggggactggagtcgtaaacatctgttgacctgtgttctagaaggactaaggagaattagaaaaagcccatgaattattcaatgatgtccaccataactcagggaaaggaagaaaatccttctgccttcctcgagcagctataggaggccttaagaaaatatactccccggtcacccgaatcactcaagggtcaattgattctaaaagataagtttattatccaatcagccgcagatatcaggagaaagctccaaaagcaagccctgggccctgaacaaaatttggaggcattatcaaaacctggcaacctcagtgttctataatagggaccaagaggaacaggcccaaaaggaaaagtgagattggagaaaggccgcagccttagttatggccctcagactaacaaaccttagtggttcagagaggacagatagtagaggccaatcacccggtagggcttgttatcatgcggtttactaggacactttaaaaaagattgtccaatgagaaacaagctgccccctcgtccatgtccactatgccgaggcaatcactggaaggtgcactgccccagcggacgaaggttccctaggtcagaagcccccaaccagatgatccaacaacaggacagagggtgcccggggcaagcgccagctcatgtcatcaccctcactgagccccgggtacgtttaaccattgagggccaggaaactgacttcctcctggacactggcgcggccttctcagtgttaatctcctgtcctggacgactgtcctcaaggtctgttaccatccgatgaatcctgggacagcctgtaaccaggtatttctcccacctctcagttgtaattgggagactttgctcttttcacatgcctttcttattatgcctgaaagttccacacccttattaggcagggacatattagccaaggctggagctattatctacatcaatatggggaacaagttacccatttgttgtccccctacttgtggagggaatcaaccctgaagtctgggcattggaaggacaatttggaagggcaaaaaatgcccgcccattacaaatcaggttaaaagatcccactgcttttccttatcaaaggcaatatcccttaaagcctgaagctcataaacgattacagaatattgttaaacatttaaaagctccaggcttagtaaggaaatgcagcagtccctacaacaccccaattctaggagtacaaaaactaaatggtcagtggagactagtgcaagatcttagactcatcaatgaggcagtaatttctctatatccagctgtaaccaacacctataccctgctctctcaaataacagaggcagcagaatggttcacagttctagacctcaaggatgccttcttctgtattcccctacactctgactcccagtttctctttgcctttgaggatcccacagaccacacgtcccaaattatgtggacggtcttgccccaagggtttagggataggcctcatctgtttggtcaggcactggcccaagatctaggccacttctcaagtccaggcactctggtccttcaatatatggatgatttacttttggctcccagttcagaagcctcgagccagcaggctactctagatctcttgaactttctcgctaatcaagggtacaaggtgtctaggtcaaaggcccagctttgcctacagcaggtcaaatatctaggcctaatcttagccagagggaccagggccctcagcaaggatggagagggaggacagggaggagagggagaaggaggggaaggaggggaaggaggaagggaggagagggagggaggggaaggaggaagggaggagagggagggaggggagggagaaaggggagggaaagaaagaaagggacctgggaatatgttaatggacaaaacagaaagaaatagtttactgtctgtcttccccactgagttgggaacgccatgacaacagggcctgggactgtcctagtcaagactgggttcccagcaccaggctctgggccctgtgcagaaatcagtgtatgaaatattttgcttctggttcagtcctaaagggccaaccctcccacggacaactacatacgctggctggacaagaaacaaacaattatctgaaggcactgggcagattctggagggagtgaccacttaggagagtggcagaacactctctcggtgtttttgaaaatggttttgaaaactttcagcctgagggcagactgaaattgtgcttgaagagccacaggatagagtccaaggtgaccaaagctgccgggaagtgaggggggatattccaaagaggggagagccagagcgaggagtcccgaattctgtgtatcaactctgccctaatctcttgctgggagatgtatgtttttgttgttgtttttgttttgagatgggttcttgcactgtcacccaggctgggtgcagtggcacgaccacagctcactgcagttttgacctccctggttcgagccatcctcccacctcagcctccagagtagctgggagtgtggtcattcatcacacccagctaatttttgttagagacaaggtctcagtgtgttgccctggctgaagattagtttttaaatcttttgctgggggtgcatgtatggtctgtaaatcagcaagaagccaggcacagtggttcacgcttgtagtcccagcacattgggaggccgagtcaggaggatcgcttgagttcaagagttgaagaccagactgggcaacatagcaagacctcatctctacaaaaaaataaaaataaaaacagaaaaaccaaaaaaactaattccaactaagctaccaaaacacgaaactcaacactctttggaactatatgatagaatccagagtatccacatcttattcctatatcccaatatccaagaaacaatccaaactaactcaaaatacaaagaaacaggaaagtgaagccgttttcttttttttgagacagagtctcgctcttgtcaccaaggctggagtgcaatggcgtgatgtaggctcactgcaacctctgcctcctgggttcaagcgattctcctgcctcaggctctccagcagctgggattacaggcatgcaccaccacgccgggaaaatttttgtatttttagtacagacggggtttcaccatgttggccaggctagtcttgaactcctgacctcaagtgatccacccacctcagcttcccaaagtgctgggattacaggcatgagccactgagcccagcctgccatttccaagcgaaaagatgataaggagactgaccccaagatgacccagatgttgagattagaagataaggagtttttgttttgtttttattttgtttttagagggagtctcgctatgtcacccaggctggagtgcagtggcgccatctcggctcactgcaacctctgcctcccaggttcacgccattctcctgcctcagcctcccgagtagctgggactaaaggtgcccgccaccatgcctggctaatattctttttttttatttttagtagagatggggtttcaccatgttagccaggatggtctcgatctcctgacctcgtgatccgcctgcctcgacctcccaaagtgctgggattacaggcgtgagccaccacacctggccagaagacaaggattttaaatcagtcattataactatgctcaatggcaggaagaaaaacatgcatgacaaaaaatatacaactgaccaggcacagtggctcacgcctgtaatcccagcactttgggaggccgaggggggccgatcactggaggccaggagttcaagacccgcctggccaaaatggtgagaccccgtctctactaaaaatataaaaattagccaggcgtggtgccgggtgcctgtaatcacaagtactcaggaggctcaggcaggagaatggcttgaatctgggaggtggaggttgcagtgagcccagactgcaccactgtactccagcctggtcaacagagtgagactccttctccaaaaaaaaaaaaaaaaaaaaaaaaaattagctaggcctggtggcgggcatctgtaatcccagctatgcaggaggctgaggcaggagaattgcttcaacccaggaggcagatgttgcaatgagccaaaattgcatcactatactccagcctgggtgacaaagcgagactctgtctcaaaataaatgaataaataaaataaaataaaatatgaaccaaatggaaattggagaattgaaaactacaatatctgggctgggcgtggtagctcacgcctgtaatctcagcacttttggaggccgaggcgggcagatcacgaggtcaggagatcgagaccatcctggctaacacggtgaaaccccgtttctactaaaaacacaaaaacttagctgggtgtggtggcaggcactggtggtcccagtactcgggaggctgaggcagaagaatggcctgaacccgggaggcagagcttgcagcgagccgagatcgcaccactgcactccagcctgggtgacagagcgactctgtctcagaaaaaaaaaaaaaagaaagaaaactacaatatctgaaatttaaaatcagtgggtagtagctgggcacggtggctcacgcctatcatcctagcactttgggaggccctaggtgggtggatgacctgaggtcaggagtttaagaccagcctggccaacatggtaaaactccgtctctactagaaacacaaaaaattagccgggcgtggtggcgggcacttgtaaccccagctacttgggtggctgtggcaggagaatcacttgaacccaggaagcagaggttgcagtgagttgagattgcaccattgcaacaaaagcaaaactccgtctgaaacaaaataaaacaaaataaatcactggatgggctttacagaaggatagagatgactaaacagttagtaactgtgaccagtggaaattctccaatctgaagaaaaggtcagtgggtcaatccaaagatccaactgacctgtaactggaaatcaattagtgagttgaatagttgcacgaaagcatgttattatattatatgctgacacagctataggctgagaggttaagcatgttgttcatggccacagatccaggatggaaacctagacttcagagcctatgatcccatcgtgttctgtcagactaatacttatatttgaatgttttaaagtaggcctttttttaaaaaaatgatagggctggccatggtggcacctgcctgtaatcccagcattttggcaggctgaggtgggagaatcgcttgacctcaggtatttgaggttacagtgatttatgattaggcaactgtactccagcctgggtgacagagaaagatattgtctccaaaaaaaaaaaaaaaaacacacagataaaagtgtgagttaggggccaggagcaatggttcaggcctataatcccagcactttgggaggctgaggcaggcagatcataacgtcaggagatggagaccatcctggccaatatggtgaaaccccgtctctactaaaaatacaaaaattagctgggtgtggtggcccacgcctgtagtcccagacagaagaattgcttgaacccgggaggtggaggttgcagtgagctgagattgcgctactgcactccagcgtggcaacagagcaagaccccgtctcaaaaaaaaaaaaaaaaagtgtgtaagtcagaagctgcttaaaaccctaattcagaagcactgctccactgtctattgccaggagctaggaaggctggcagggtgtgtgaagagcgtctggtacctgcagtgaacatttttcctgcaccagagatcaccaccgcccgacagtcagcgtctctcgaaatcttgttgaagcactctaccatctctctgtgaagcaacgagtgaagggttacaaatggggcgggaataccctgccctcatgtccatcttcccacaacgttccactttcacccagtcccgcagccccgcctccccccgcaggcaggcctccaggatctgcaggtcagacctccagaagaccttgttcatggcattcctcttgttgggccggttgagctggacatgcagaacatgtttctgcgcagacgtcacacgaagggactcatagctgtggtctggggcttcaccgagggctactccggaagcctcctcttgtgcagaggagccagtgaggcgaaggctaatactgagtcccgggtagttggagcctgtcagtcctggggagaaaggaacagcctttgatgaccccagactgcaagacacaggcctatcgaattagggagtccttcaaaagggagcacacgcacccctgaatttaggggactcgggcccttcgtgaccccggatagccctccccgtcctacatctgctataacagcacgacagcgcgacgcacccccataaggcaagaggtgactcacgccgggtcagtaggtcgcggagtctgcgagaagccactatccccgccgccatcgccgccgccttcgtctactgcgttcggacggagtaacgtgcccgttagcggagggggcgggcacagaaggccgccatgttgagcgagggcaccgatgccgcaacctgacaggcaatgacgccgttctttccgccatctttactaagggcagtcgatttccggttgccttacatagagccaggctcagaaatggaccctttgccccagtgggaacctggccaaagaaaatagctcctgcaatggcgtgaacctgggaggcggagtttgcagtgagccgagatcgcgccattgctctccagcctggcgaccgagcgacactccgtcttaaaaaaaacaaaacaaacaaacaaaaaaaaaaacagaaaagcaaacagctcccgctaaagttcatcacacagctgtttcataatggtggaataataggcgacagctgaaatgtccaaggacataattgcagcagagcttgtaatcatgcatgtatatatcatgttaactaaaaataaaagaaaacttgcagtactgtgagtttactcaggtaaaggaatgagtacagacgggccaacattaagcgctgactgtataatatgaactcccaccaggaggtcgtactatttcctactatatgcagaggaaactggcccaggcacgggaagacactaggttcaaggtcggtgggcttcagaagggctaaagcaggattacctggcaccagagttcatgttcttagcctggcgcagtggctcacgcctgtaatacaagcactttgggaggccgaggcaggcggatcacctgaggtcaggagttcaacagcagcctggtcaacatggcgaaaccccgtctctactaaaaatacaaaaattagccgggtgcggtgtccggcacctgtaatcctagcgggaagagaatggcttgagcccaggaggcggaggttgcaatgagcagagatggcaccactgtaccccagcctgggcgacagagcaagatctcaaaaaaaaaaaaaagaagaaaaaaaagttcatgttcttaaaaaaaacaaacaaaacaaaaaaaccgaaattcccttgggaaaagccagctaccaaaaggcataaaaagtactgtaaaactgctggccgggcgcggtggctcacgcctgtaatcccagcactttgggaggccgtggcgggcagatcacgaggtcaggagatcgacctcctgacctagctaacacagtgaaaccccgtccctactaaaaaaatacaaaaacttagcgggcatggtggcgggcgtctgtagccccagctactggggaggctgaggctggagaatggcgtgaaccccggaggcggagctcgcagggagccgagatggcgccactgcactccagcctggggacagagcgaaactccatctcaaaaaaataaaaaaaaaaagtactgtaaaactgcttaagtatgctttttggggagacattgagcaaggcggtgaacagatgtctctgggccagtgagattgaaggaagtatctttccttaatgaacctgtctcctgtgtgttttcacagactagaaaagcaggctcttttgaaagacagaaccattaactacccatcaacagtagactgtttataccatagaaaactctgaaacctctatgcaaaaataaaaatgtgtgagaaaaaaatgtgaagatgtaatagaacatttagtatgatcctttgttcctttggtgtaagaaagtatagctgggctgggtgcggtggctcaggtctgtaatcccagcactttaggaggcccaggcaggcagatcacctcaggtcaggagtttgagaccagcatggccaacatggtgaaacccaatctctattaaaaatataaaaattagccaggcgtgttggctcatgcctctaatcccagcactttgggaggccaaggcgggtggatcacaaggtgagaagatcgagaccatcctggctaacacggtgaaaccccatctctactaaaaataccaaaaattagccgggcgtggtggcgggcgcctgtagtcccagctattcgggaggctgaggcaggagaatggcgtgaacccaggaggcggagcttgcactgatgtgagatcacgccactgcactccagcctgggccacagagcaagactctgtctaaaaaaaaaaaaaaattagcggggcgtggtggcaggtgcctgtaatcccagctacttgggaggctgaggcaggagaattgcttcaacccaggaggcagagtttgcagtgagctgacctcatgccactgcactccagcacttcagcctgggtgacagagtgagacaatgtctcaaaaaaaagagtgtagctggacctgcacagaatatggtgtatgtatgtaatatctctggaaggagactcaaactggtaacaggaaatgaaattggatgctaggagacaaactggtaaaattcactttttatcaccttgactggcttaaaaacaataaaccctagttgattttatttatggctgcaagatgactgtagtttttccttgtctaaagattgtttgaaacttcccatagtgaagcaaaacttgttcatctgccaaatgatgcttttgtgatgtcattaaatgttaaaaatgtaaggccgggcgcagtggctcatgcctgtatcatagctactttgggaggccgaggccagtggatctcaggagttcgagaccagcctagccaatatggtgaaaccccatctctactaaaaatacaaaaatcagccaggcatggtggcacatgcctgtaatcccagctacttgggaggctgaggcaggagaattgcttgaaccaggaggcagaggttgcagtgagccaagattatgccattgcactccagcctgggtgacagagcaagactccatctcaaaaaagaaaattttattcacagtaaattccccagagtgggctattctcaagcacacatgcataaacttcaaggtttgtgacctgctcctctgcaggtcacctcttccctccagtaggagtcaaaatccttaaaccaggatccttccgggtggtacccgccaccgcaaggcatcttcacagatttgcatctgcaagtgggaagctatctaccgtatgatgcaattatatagatcctttaagttttgagacatggtctcgccctttcgcccaggatggagtatagtggtgccatcacagctcacagctcaagtgatcctcctgcttcagcccccatgagtagctgggactataggcacagtgtgtgccaccatgcccacatcatttttctatatatttttttctcgagacggagtttcactctcgtcactcaggctggagtgcaatggcacaatctcggctcactgcaacctctgcctcctgggttccagcgattctcctgcctcagcctcctgagtagctgtgactacaggaacgtgccaccatgcccggctaatttttatttttttagtagagacagggtttcaccatgttggccaggctggtctcgaactcctgaccgtaagtgttccgctcacctcggcctcccaaagtgctgggattacaggcgtgagccaccatgcccggcccactttcttattttttgtagacagggttttgccatgttgcccaggtctcaaaactcccggccttaagtgatctgcctgccttggcttcccaaagtgctgggattacaggcatgggccactacatccagctatatatatcctttaacccagcaattccactggcaggaatttatctcctgatcagtatcagggaagctggccaagatacttgtgtagatacgtgttacagcgctgtttgcaatagcaaaaatagacctggaaactaccctttgggaccaggttaaatcatgacacatccacacaatgatactgcaagggtaaagacaagtcactctgaaatgatacagaacacaaaggttttgggtttttttgacaccctgttgcccaggctggggtgcaatgaccccatcacagttcactgcagcatcaccctccagggttggggtgatccacctcagcctgctaggtagctgggactactggcatgcgccactatgcccggctgatttttgtatttttagtagagacagggtttcaccatgatggcaaggctggaaacctttttttttttgagatagggtctcattgtcacccaggttggagtgcagtgatgtgatcactgcactgttaacctcctaggctcaactgacccacctgcctcagcctcccgagtagctgggactacaggtgttccaccaaacccacctttttgtagtgacgtttcaccatgctgcccaggctggtcttcaactcctgagctcaaagtatgtgccccaccttggcctccccagattgctggaattataggtgtgatgacccactgggcctgatagagcttgctcgggcagggcccagtaagaatgccactaagcctgatggattttcctcaaagactcaattgctagcaccattctcagtctgcagcccaccctgctcctcttgggtctctgtatgcctccagagggcctgtgactgtgctcaggcctgcctgtgtcttcaggacagagagggagaaaagcagacatcctggaatcccagcaagtgctgtgtttattttccaaacaattttattgaaatgtgccaagagtacatgggcagcacaaatgtatgaacaggaaaaaaaaaaatcacatgtacaataattttttaaaagtgaaggttaatcttgggagataacagttcccctctccctccccctgcagatttccagcgtttccattaaggttaagtaagcctctacaaacctagcatttaaaaaaaaaaaaaaaaaaaaaaaaaaggaatacaagatcttttgcaaataacaaaaacaaaaaatggcataaaggaaagagaaatgtcttcctgctcagatgggactcttcctaggcacctaattaggaggcgtgctgagcagtggagaaacacaacttcagagtgtaagggtatggaccatctgcaaaggagagacaagtttggttggttcccgtctttggaggctccccaaacccaggtcccctcaagtttgtacccatctcccattttctgcaggtcaacggcaggggtctaaggagtgactgcccaacgtgaggcttcaagatgagccaattaccaattatgcacggcgtttctccttctcttccttcattcccatagagaatcccattcctatctccttcgccagcccaaggcaatgggcctctcccagcaactgggtgggcaagttttacctgctggatagtgttgcctctttcctaggtaacagagtggctttcctacctaagccagtctctgatgcaaagaagagaatgccacctccctggaggacaagcctgagcaactcccaagctggcagagtgagtggcagcaggcagtcaggctggctctcccaagaggagcacaggctgctctcctgatgagcaggtcccacctgcctgtgtcaccaacagtgcgaagatcccggggtcctatctcaagggcaggaaggacatccctggcctgaagccagccaacccattaggtcaccaggttgatgcctgcaggacacacagatactcacttgggtttttcatctggtaatggttcaggaagcccagagtctccagggcatcgctcttggattcccactccagcagtccagaggagctgcgctcacctgattgcaaaccaaggggaaaagtaaaggttttagactcacccaataggaactaggcagctgcccaccaaccaccatgcaattagggcaaggaggtgggcacactcgactcacttttgcctgagaatactttcacagaagatggccgcttcactcccagctcatcgcagatctgcaaaagaaaacaggtagtaaatgaactctgaaacaaaagggccgccacacaggattcaagcagaccaggccctgcatgactcagtacttgaagttttcaggagaaaaggcttgtagattttatcacataccctaaggcatccctgtgtcataaaaaggccagcaacaatgctctttaattattaagttgcctgagactgggaagctgctttttcgttcccaacttcaacagctatgtggatatctgcacccggctgtttgctgaacactgtttgctgaatgcaaggtcaacatttcagaccacagccagatccacttgagttcctcctcccttccgctgcctcagttccccctgactgagctttacagggccccaccttctgatggtatcagggtgatggcacccgaagcctacgccaatgcggttcttgtgaaattgggccctcatcactgggcctgtgaagcagctttcccagcaaacgagcagttgccctgcttgccaaaaatgtaaaaggaaggaacgcggcaaatggtgttgctagaaacttggtgccattctcaccctgtccagtttgagagcacagattcctatctgtcctggcctctgctgtgtccctagcactcaacccagggccaggcaggacaggagttcaacagctatttgcagaaaagactgaaatgaatggcctactcagacggccgtggcaaggacccgactgcctgcgcagctccacggcacacacctcaaagaagttctcctcggtcacctccagcggggcgttgaagaagtgcagcacgttgctggggtgctggatgcggttcttggctgcctgctctggggtggagaaccgattgttccgggattcactgaagtctttgtaactgcaagacccgtcttccaacccgtatgactgaccaggcatgatggctggctgcttggagacactgcagcaaggaagaaaggggagcctttgtcatacccaaagttgtccctgaagctttcccctgtggcctccagaggcttagcttgccctgtgtgccttggggcattgctctacacctgaggcaaggctgactcactttctcctgtggtgtcagagacacgtctgggaacacacctgccacatcccatttctgtgtgagtcaacacctcggcctcactgtgctcctctgctgggccccattcccctccttttctctcccctgtacctctgctgccctcccgagcctgagcacctaccagacattcagcttctgcccaaacatgaagttgttgttgaggtgggtaatggcccggtctacagcgtagccatcagccatctccaccatggcggcccccggcttgcttttcatgaatttcaccttggggagagtagctgcagtcagcacctctgtccagctgccagggtcccctctcctgcccctcccaagttagtgataataacccctgctctggcctcccatgtcctcacagttaatcgggaccactagaaaaacatgcctggcccacaccaagtgctcaacccatagtgagaagcagagcctgggccatgtttttaactgtgggacataacccaccagtaaatcatttagtgaagcatgacagaaaactgtacaggaatcagaaatcaaatcagccattttcaccattttgtctgttacacacagacgtgtgtgatctatggatggctgtgtctacagtcacaaggtaaaatactccttcagctgggttacaacagagcagtgccggctctggagccaggcagtctggctctgagtcctgcttcacataaaggctatgtgaacctgggcgcgttatttaagccccgtcctccacttcccctgtccatctcattaaggattaatgtgagaaattacacaggtcactacatgtaaagcatctttaacagtgcctggtaactaacaacacttcacctgtgttacgaactactctaagtaatgggccaagtcatgagctgcacaaaggcccccaagacccagacgggtttaatgttaagcaaaatgccgcctggtctcaggtagacactcagccaccgctagccccagtcaactgtcccatgggaaggcagaaggcccggtgttgccaggtcttaagttttcaggaggaaatccttaaacgatggtgtttcactataatggattcatttttatgttttataaatctctatgttcatgtactggtattagtacttttatgtgataaaatcttttttttaaacattggtaattcaaaaacacaacacccacatacagtgaggaccaaacaaaacccgtctgcaagcaggctgcctgagctcactgagtcactcattggcgtctgcccgcccagcgccacaccaggctcccccctggttctttcccgtgctgactggcaagatacgaggctcagcgaggaacccagggggcccggcagcagctcaccttctccacattgccatataagcagaagacattgaagactcggtcacagttcatcttagattgatccaagccatagaccatgagcacagggctgtcggcgtgagggccatactcgggtggtgggggagggggtggggggtgcccatactgggggccgtagcgacttgggccccgacggtgaccccccactggtggacccatccttctcccttcgtagtgaggtggggggggcccgtagccctcatcatggtaatggctgtggtacccaccgtggggccctcctggggggtgggaaggaaagagagggaggacgggtgagaatttgcacggcgggcggcgggcaggggcacatgagccacgggagtccacggaggggaaccccctgccctcaccatattctgcggggtgatctcccaggagagggggctgcctctggcgtttgttggggttgctgccagggtcacctgtggagagagaaaacagttaggagtctcactcagaaattggggtctctccctccctcctgactgcacaggctgatctgagcccccagctcctgccaactgcaagccctcccttcctcgagggctgtggggcctccttttgtgatctgacctacggcgggcatgaagcccgagcctcaaagctggtgcccactctccttcccctgctcataccaaagggctggccttgttctgtgaaggacaaggccagattctgtgctctcacctaccctggccctgggagaaagcccagctcccaggccctctggggaatgtgcagctgctacagaagctgatatattatggcgggccaaaagcagctttctaaagtgactcccaatgaagggagagtagattaagaggaaaataaccccagagggaagcaagcaagtttgacccccaaagcccccaaagttctaggagctccagactgtctctgttagatcccttctttcttaatcccagtcccccctccctcccagtcccgccagcccaagagggactgactgtagctgacaagcagggcaacagcagaatcagttcaaataagcaatcatgtacaaggcatcgacattcccacacccagcaatggcgcagatccaccccgaccccagcagttcgtaatcactgcctttaacttagcgcttaagtggcaggcactgggctaagcgctttacagacatcacagcttctgaaattcctcacaacaaccctatgaggtaggttctgatatttcagccccattttacagataagaagactgagttgttaacttttaactgagcagttaaaagacactttggcccaaagtcacaaagcaagacagtggctgagccatatttgaacccaggtctggctgactccaaaacccagggctcgaaaccactgccctttcctgccacccggcctgggttttgttaccagtcattacaaaatggaaaaggactacttacagcagaagtacagagtacaatgtccatttgtcacaaaaaacaaatctgtattttctcttaccattggacgcttcaacagtgagttagcacagttctgaaagatggcgtcccatcaaacatacactgcgaccctgcatcacatggttttacagtcataaatacaagtcacggtacacatccgctacaatttttttaaagaattgttttaaaagtcaatattttgattaaatcaaaaatggctcacagatgttctgtcctcagaagatatcagaaaagtggaaataaaggtgtatgaagtgggtagtgtccctccatgttgtcacctcctcacatatgtgctgcagtgcggtggtgcggtgcttctggctgtgtagcgctccgtgtgcgtgtctcctggtatgaggtgtgccagtggccccactacgctcgcgcttttggccttgggagcgcgcctggttacccggcagcaggtaactgtgtgcctctgagctgtttggctgtctggttttaggtctgttttggtttttttgattttttttttgttgtggttaaaatttttttttttttttttggtttctgatctccagttggtgcagattatgttggcagccggtgactgcagaaaaaataaaaatatcaaaacagaaaaaaaacaaggccctccccaaaccaaatgacttaaaaaacaaaacccatatggcgaggaatggagagaggatcctattgtcttggaggcccatggaatctacttccgtctatgaaacgttctccgaaaagagcatcgctcgctggctggctgggacagctctgttctctgtgtttcctacttctgtgtacattctcgggttcaagtttgcttggattttgaccttttttttaatgtttaataaaaaaagcagtgtctgctgccatgttgcgtctctttctctctttgtctctgtatgcctctgtctctgtgcttgtagctgttccttggagcgcggtgtggtgttcttgatgtagtgagctcaagtctgcggctgtttctggggacgtggtggaggctgcatgttctgttctctccaggaagagctagtggttttctaccctgtgtgttggtgagcaatgtgcagaggcagagccgctgaagtatggttcctgaggggtggcgaagcaccgccctcactccaggtcacctcatcagccctcgtttttttttgggccccagccttggggctgccaaagctgagaggcatcaaaaccaatgcacagccagccccctgccactagcccctgccggtctgcacatcttctatttatgttccttggagaagaaatggttgttgccatgtttctgttagcagtcatgtaatgccattgcccgctctggtacattcacttggtcaccaatttgcctctgacctttggagggagcagccaggcccacagggcccactgtgaggatcctggggaagagtctagcccaccctgcccactgcttcccagatgcaagggcgagcaagacaggcctgcctaggaatggggggctctggcctctcagggcctgtgcgatgtcagcatcgagcctcctccctcagcccatggcctggtccgacgtatcagaccaagacagacaccgagatggatggtcttgttggggggctgccgctgtttctcataggcaatcctccacctctccctgctaccaaaggcaaaccattcttgacagacactaggaagggagttgtccatttgggccacctgcagagatgttgcgtcccctctacaaatgatgtgaggcatgtccgccctggtccaatccagagtgtctcacctccacagggtcagcttgctcacaaggctcactgcaagagcccaggagacctcatcgccccccaacactgtcactcccccaaatcagaccctctcaacagcgcagaacaagaggacaattcctggtccagcaagaatggagtgagtgaccctcaccagactctcaaaggagccactgctggtttctaaggccgcccccacgcctcatcctcagtgaggccctgctccccgcccatccaggcttctgccttgcctctgtatcctgagcagcatcggagggccccaagcagcagtgaagacccatggaggcctctcactcccccatcccactagggtgtccaagtgctgaccccaaggccctcccatgtccatggggggcccaatggcattacataaccctgagcccaggcctattaagtgcactagtcgagtgaaagcaaggcgggtatgtttagaacaaagtggtcgtcaagattaccttgtccactgagattggggtttgtgtagtcccaagtatcctgatcattcttgaacacattcaagcgtgtaggctgcaaggacaggacaagacaagacttgaggtcagccatgccccagctcacctggaagctgacaaggggcagtcagtcacctcccagatgtacctttgcgtattcgatcttcagagtgcaacagccagaatagatatcagccccattgagagaggccttggcccgctgggcactttgaactgagtcaaatgtgagtcaagttaaggaaagtcccatcacaggagatctttgagaagggcttcaagttaccccagagtgtgataaggacaaggtagcaccccaagactgtggtacagacggaagctttgggattagctcactgcccagccactagcctcaggttaagagaccaaaacggtgttgatggactcaacgctgccccgggtgagcagtcactggccagagttctctcataatctgcaccccgacccatggccaccagcaacctcttctgccacaccactttctccgtctcagccctctcacacccttcgactaaatctgaaacatcaactcgattacagctctgccctgaaagtccatcagtggctttttcctgcccctgccccaagcatcgcaacgctgtctaggatgccctaaaagcttcttccaatgtctattccaaacccgtctgcttgccagccactttgcaatcctcaggtctttcaatttctccatccaacacaagctccttctgactttacaacctttgcagaggctgtttcctccaccttgagtataagctcctatttgctcataggacatcacctcctcagcaaccttcacacatgccccaccttttttttttttttttggatatggagtctcgctgtgttgcccaggatggaatacagtggcacagtctcggctcactgcaatctccgcctcccaggctcaagcgattctcctgcctcagcctccagagtagctgggattacaggcgttcaccaccatgcctggctattttttgtattattagcgacagggtttcaccacgttggctaggctggtctcgaactcctgacctcaggtatctgtccacctcggcctccgaaagtgctgggattgcaggcatgagccactgtgcccggccccatatccccttttaaataaattccttttcccaggggcacattttctcaggacctcttgagactatgttccccaaatctttgtcactcatatttgaacttagaataaacatctttaaaaataaattcctagccaggcgcggtggctcacacctgtaatctgggaggctgaggcaagtggattgcctgaggtcaggagttcgaaaccagatctctactaaaaataaaaaaaattagcaggcgcctataatcctactaggaaggctgaggcaggagaattgcttgaacccaggaggcagaggttgcagtgagctgagatcgcaccactgcactccagcccaggcaacaagggctaaactccatctcaataaataaataagtaaataacagaaagaaaacaaaaagaaaaataaattcctttgtatctcccaacacactgctctctcccctaagatctgcacgtccacacgatatgcctggtcctttaactgcctccctactcagtcactgggctctgtgaaggcatctggcacatggcagccactcccgtggtcagcagacacatgctggctcaaagaatggccactgtcaagccctgcaagagtccctaccctaaggaacacctgttttccagcaaaggatattccaccatcgcctgaactccattcttcctgaaaatgacaattctctggacagggccacaaggattacagatagtgtaaagaacatcctgcaaaagcaaacacaggcaagatgaaggggcactggcagatcagtctggcttgggggagggaataaggggagaaaaggaagggagacctcacaagaaatgcctgctggcacgtaccgtggtgatcgaataaatggggttcaggatggtaaagagaagcacactgttcacgctccgggagtcatccgagtccccagggcgggagatcttctggctggtagagtagttgacaaaagctgggtgaccagcaatgtatatttggttgtcggctgcgtagttcactgcgttgcaagcccccaacacatcttcaaactccaccagtgcttgtctctttttaggcattaccaccacatagctggcagagagaacacaggtttcaatcctctcaggaaaatgtagacaggaggagggtatcatttgattttttgagaactgactcctccatggcctctgaactcctctgcaaccctatcatggttccccgacctgaacaccctgtgccacaagtagtaccaaaagccaaagaggtctagctgagccatcatgtccctctgggaagccttcctgacctctcctcaccagactgtcagatgccacccacagacggcttcttgagcttacactatgacagtgcaaatcactctaggagggcaactttctaagagaagcatccagatacagctcactactgtatttgcagtatatagcatgcaccaaatattcagtaactacttgctgaatgaaagaacactggccaggagcagtagtagctcatgcctgtaaccctaaaacttgggagggctaggtgggcagactgcttgggcctaggagtttgagaccagcctggccaacatggcaaaacctcacctctacagaacaatataaaaattaggccgggcgcagtggctcacgcctgtaatcctagcactttgggaggccgaggcgggcagatcacgaggtcaggagattgagaccatcctggctaacacagcgaaaccccatctctactaaaaatacaaaaaattagccgggtggggtggccagcgcctgtggtcccagctactcgggaggctgaggcaggagaatggcgtgaacccacgagacaaagcttgcagtgagctgagattgtcactgcactccagcctgggcgacagagcaagagactgtctcaaaacaaacaaacaaacaaaaaatatatatatgtaaaaattagccgggcatggtggcgcatgcctatagtcccagctactcagcaggccgaggcagaaggactgcctgagcctgggtgagactgcaccactacactccagcctgggccacaaagcgagaccttgctctgtctgaaaaagagaacactgactagaaactacaaggcagaggaaaaacgaaggaaggaaaaagggtcatggaacttgctgtaatctgacacaaagtacaatggccaacccaaaagcagagcggccacagaatctagaccaggatggcaacaaaatcactatttccaaccagaaatcgtggacacacaaggacacccaggagtcaactttggaagcccaacacctggcctctgagcccagtacctgatgggtccaaactcctgcaaggcctccacaaggtctgcttccaccacaccgtcaatcaggcccctgatgtggacaactggggaggcaggggttttgtgcgggtcatcgtagttctcctgagaaaggaagcaaaaacaagaattattttcttgctgtacaagatgacgccccactggcctctgtactgttgtagacccagtcagataaaacagttggaggtcatccgtgaaggatgcacaggaaagactaggggcagcaattgaagccaatcagcccagaaggattctgggtcagcagaacagtggtcctgagtgggtgatcacttgcccactggctcttgctgtagcttctgaggaaggtataacggagggagggccacacaagtcccaaatcttacgttcttccagggacccccctctcttcccactggtccactcgaccaaggaaacatgggaaaagagtagctggaaaaggagatacactggcagcaagggctctaacagctatctgctacagtttgaatgaggacatcccctttgcatgtgccccaaattccttgccctttaactggctgagccaccatcatctagctaagcacacctgttccccaccactcacacccaggttcagtcagggcaaaaaacaacacatgccccagaaactggggcagccaggccagtcttgaccccttctagtcttgaatcgccctcccaccaaaatctgctttggaaattactgcctaggtcagactaagaaaaaccagacaagaaaagtcttttatttattttttgagatggagtctcactctgtcacccaggctggagtgctatggcgtgatcttagtccactgcaacctccgcctcccaggttcaagcgattctcctgcctcagcctcccgagtagctggaattacaggccctcgccaccacacctggctaatttttttgtatttttagtagagacggagttttgccatgttgaccaggctgttctcgaactcctgacctcaggtaatctgcctgcctcagcctcccaaagtgctgggattataggcatgagcccccactcccggatggaaagtcttttagaaagaccagagactccaacccataccattaagaaccgactgctccttcctaagagaagtatcttacacccaccgacaaaagcctctggtcatcaggagaaagattaactctcttccgcctctcctgggctctggggccggccccctgtctgagaatcactgggcagaagtgcgtggaaggtgggtagaattggattctatttcaggagcgatccacgcgaaccacagggtgaggcactcccgccaggttagcagctcccacaaatgggagttctaactccagccctgcccctcactagctgtgccacctacagtaattcacctcatctcatctctctcctggcccatttcctcctttgtaaatcgggaatcccagtatctcccccaacctcaggaagcgttaaggattttcaattaagatgtctttaaaatgtgtgggacaaggccaagattaaaacgctagcaactcgtaacccctaaaccctggaaaaccctgcaaataggcggccctgtaagacttcaagattttggaaagagtggggactgggccccactccaaaagcaacgactggtgttttcggagggactgattacagggggtcgaaatgcttccaacatggccaggaaatagtttggtttatcaaatcctcggtacccagtgaatccccggaaactgtaagcaaacttgtgatggtttcaaggcttcgctcaactcctaaaaggctaaaagtgcatttcacaagtcctcttcccattttcaatgcctacaaaaatgagagcatctaggctcaaacacatccatttctgtatagacacaaggctgggccttagagattaagctgccatcagacggaattccccactctagagaacaaggccgccgcccacccgttcccgctcaccaggcgctcccctaaccgcccacgaggccgggcgggaacactgcgcctgcgcatggagccagcgaagaaaatgataaaggggaaaaaaaccggccgggccgcgtgcccggcccccacacgccagcccgcggcgcctgcgcactgggccattcgcctcacgagctacttcctctgcgctcccccacaccccgctccggaccccgcgcacgcgcaggcgcctgtcctcgcgcaaaccccgccgtttgcccaacggccgcccctcccccacaccgtcaacgacgcgatggcctgggcgcgtgcgcagaggcccccctcaaaaaataaaatgccctcaagctgggaaattgtcccccagttcccggccttcccagcgcctagggccctggcctcaccccaccgccgccgccgcccgccgccccggctcctccaccgccaccgccgccgcctccgtgctggtcgccggcgttgtcagtcttgagccgcttaggggcccggccgccctcactgccgccgccgtagtagcggccaccgccgcctccgccgcccgccgccgccatcttcaccatcgctcccgaccgcctccgctgctcgtccggctgctgcctctgctccagccgccgacgccgcttctccgcccggggcagcagcctccgcgacatggcggcgcagaacccgcctccccccgcctctcattgggggagggacacgcccgtcacccgccgcccccacccgatagggggagccactggtcccgccgcggggggagggtaggccgccacacgccttgcgcgcttattggacattgcccacgccgttctgcaggagggcccgcccttgtttgtctgagacactccttataggtggtcgctttctgccagtctttccgtcgaccccgccgccttaaaataaaatccaatttgataggtcggatttctggcgctgctggcctccctaaaagcacctgataggaacggcgctctaaacctcccaagaatctccgcctccctcccactttcattggtctcctcgctaatccgtcagcaccagtcacaatgacgaccttcccgcgccacttcgcaaggagacaaggaagccccgcccttttttggtctctctccagtggtggttacagatgcccattcttctgcgtctccactgattggtcaatggagagtggagcgcaccctctcaccagatggtaggactgttgatacgctctgattggatgaaatggggagccccgccccagggtaggcgctctttggtgcagtatacgaaacgagcgaaggcgagaacgcatgcgcaaatacgctttcaggcaccgcccagaggcggggcccccttatggagcgaccgctgtgtgtgcgccggaaggctagaccaagattgacaggaactcccagggtatctctgtcgccatcactataccgtgttcatttctacctctaggaggaattgttaaaatcccaaatctgagccttttcctcagtagaaaaccactcgctgctgccgactgtcttcggaccctgtccagttctaaattcagccgcaacccctttcagtttcccttgggagaaggctcttccgcgcactctccatgtgtgcccatgcagtcccttccacctgcaatagtccactacccctcctgcaggagctaagggccaagtcatcttgtccgtgcgatctaaattaacaggtccctgccatcccagacccccaggattcccttcaaagccataactcgggccagtggttttcacctgacagctcgacccctctgagcaccacaggaggtcctggccccgaccctggagagggtggccacctaccaagcgcccagtacagcacctggcacagtgcaagccccctgcacaggggaggcgttcttgtgatctgtgcctgcgtcgggcctttcttcctcaagggcggggtaagaccacccgcactgcaccaagagaatgtcggagggtatctccagactccggcgaagcccaactggcggagcctggggggtggagaggagcgcgccccagttatcacgcgcaggcagcggggtcaaacggggattaacccgggatcccgtcctacggcatttaacattatggggctgcccgcgcagggtgtgggggggaacaccttagcgaagctattggcaagtgacgatatcgccaaaggggggaaaagaaataaaagcgaagctagcgtcgtgagaaacgcggcggacgccccaaaagtgctccaggacctttctgcccggctgatgggggatttcgagttgaggtccgggtggaaactaagtttgaaatggaggccgtgtgtggtggctcacacctgtaatcccagcacttggggaggccaaggcggaaggctcgcttgagccccggatttcgaggttgcagtgagccgtgatcgcgcccctgcactccagcgtgggcgacggagcgagaccctatcagaaaaaatggggtttatggcaatacaagaggggacaggcctggtggctctgccggtgaggggaaataaagttaggggagggggccttgctggggacctcggtcagctcccccggacaccaggaagatccgaccacgccaacggaacagagacgggggcggggccgcgtctgaagcacgtggcccgcgtgacgggaggaggccgggccggtcgcgacgaagggcggggtcgctccgtcccaacgtcagaggaatgcggtggggggagggggagagagagggcccctcccctccccgcccccgcggccggcccggacgcccctcgcgccggcgcgcacggccggagcacggcggaacggtctccccggcgccgcacgttccaggccgccggcccggcctggtgacccgcaccccccgcgctcccggccaccgccccgcccccaccccgctgctcggaccctggcccccggccgcgcgcggcgccgcccgccagtgccccggtcaccttcccgcacccctcgcccccagcccctaccagctcggcggcgagcctgaccggccgtcccggatcgaaaagagcagacactgggaagttttgggagagggaggggcgggccttaaagggaccacgaccttttttcagccccgtggggggaagaaaaattgggggcagggggcgcgggagcggggacacggcaggagaccgagggtcgccccgcgggggaatggaggaaaccaggcgagaaaggagcgggaagaccttggagccgcggtgttcgggctccgcgtcccttttccccaaaaatccacccccgccccccgcagacggaaagtcacgcagttgtttgagactcgcgcatctttcctcctggtcaggcaagtgtcttggctgaggcaagtgtttggggtgtacattgctcacataaggaaatgggctggagggacgcaagtgactaacccaggatgccacagcttgcaagtggcatggcggggctggtctgacgccggagcagacgcatcaccactgcacttgcagggcttattagggtgatggggtaggctgtagagatggggggttcagagcaggggactggagccaccctaccggggttccaacgtggaagctgcatttactgtctctggccttaggaaagtaacttagccttcctcatccgttagggggatggcagtaggagcttcgtctgggtcgtcatgaggaatgcagagaatggaaacgggaccttagaggactacccccatttcacagttgaagtaaaactggcccagagagtggaagaaccgcgaaaaattaccacagctgggcagcctctgaaagagcaggtcgctcccgttcttaatccacacaaaacttaatcggacccttgcagatccttgtaaacccatgccagccgggcacggtggcttcccctgtaatcccagcactttgggaggccgaggtgggcagattgtttaagtccaggagctcgtgaccagcctgggcaacatggtgaaaccttctctctacataaaatacaaaaaaattagctgggcgtggtggcgtgcaactgtagtcccagctactggggaggctgaggcggaaggatcacttgagcccaagaggtggaggctgacaaagcgagaccctgtctcaaaaacaaacaacaccccagaaaaatatggctgggcgccgtggctcacgcctgtaatcgtagcactttgggaggccgaggcaggagaatcgcttgaggtcaggggttcgagaccagcctggctaacatggcgaaacccggtctctacttaaaatacaaaaattaggctggcgtggtggcaggcgcctgtaatcccagctactcagaatgctaaggcaggagaattgcttgaacccgggaggtgaagtttgcagtgagccgagattgtgccactgcactctaacctgggcaacagagtgagactctgtctcaaaaaactaaaataaataaaataggccgggcacggtggctcacacctgtaatactagcactttgggaggctgaggcggctggatcacgaggtcaggagatcaagaccatcctggctaacacggtgaaaccccgtctctgctaaaaataaaaaaaaaattaaaaaaaaaattagctgggcatggtggcaggcgcctgtagtcccagctactggggaggctgaggcaggagaatgacgtgaacccaggaggcggagcttgcagtgagccgagatcgctccactgtactccagcctgggcgacagagcgagactccgtctcaaaaataaataaataaaagtaaaaaataaataaataaataaaataaagaaaaaatagtaatgctgctgtgaccattcctagtgatatcttcttgtgtccatgtgtgagagttttaagggcatgtaggtaggagtgggattgctgggtcgtgtaacatattttgacattattgggtagtaacaaattgttattcaatatatctgtaccatatattcccaccagcagtatatgagaaggtctcattcttttttttttttcttttgagacaagagtttcaatttgtcccccaagctggagtgcagtgatgcatacacagctcactgcagcctcgacctcctaggctcaagtgatcctcccacttcagcctcctgagtagctgagaccgcaagcacatgccatcataccctaatttttttttttttttttttgagatggagtctcactttgttgcccaggctggagtgcaggggtgtgatctccactcactgcaacctctgcctcccaggttcaagcgattcctctgcctcaacctcctgagtagctggaattacaggcacacgccgccatgccaggctaatttttgtatttttagtagagacggggtttcaccatgttgtccaggctggtcttaactcctggcctcaagtgatctgcccacctcggcctcctaaagtgctactagcattacaggcatgagccacagcgcccagccaccctaatttttttaaatttttttaatttttttatttttatttatttttttttttgtagaggcaggggtctcactatgttgcccagggtgatcttgaactcctgggctcaagcaatcctcccacctcagcctcccaaagtgttaggattgtaggtgtgagccatggcaccaagcctaggtttctttttttttttttttaatttaatttaattttattttattttatttattttttttttattgatcattcttgggtgtttctcacagaggggcttttggcagggtcataggacaatagtggagggaaggtcagcagataaacaagtgaacaaaggtctctggttttcctaggcagaggaccctgcggccttctgcaccgtttgtgtccctgggtacttgagattagggagtggtgatgactcttaaggagcatgctgccttcaagcatctgtttaacaaagcacatcttgcaccgcccttaatccatttaactctgagtggacacagcacatgtttcagagcacagggttgggggtaaggtcacagatcaacaggatcccaaggcagaagaatttttcttagtacagaacaaaatgaaaagtctcccatgtctacctccctctacacagacacggcaaccatcccattcctcaatcttttccccacctttcccccccctccattccacaaagccgccattgtcatcctggcccgctctcaatgagctgttgggtacacctcccagacggggtggtggccgggcagaggggctcctcacctcccagatggggcggccgggcagaggcgcccctcacctcccggacggggcggctggccgggcggggggctgacccccccacctccctcccggaccgggcggctggccagacggggggctgacccccccacctccctcccggacggggcggctggccgggcggggcctgacccccccacctccctcccggacggggcggctggccgggcagaggggctcctcacttcccagtaggggcggccgggcagaggcgcccctcacctcccggacggggcggctggccgggcggggggctgaccccccacctccctcccggacggggtggctgccgggcggagatgctcctcacttcccagacggggcggctgccgggtggagaggctcctcacttctcatacggggcggctgccgggcggagggtctcctcacttctgagacggggcggccgggcagagacgctcctcacctcccagacggggtggcggccgggcagaggcgctcctcacatcccagacggggcggcggggcagaggcactccccacatcccagacgatgggcggccgggcagagacgctcctcacttcctagatgtgatggcggccgggaagaggcgctcctcacttccgagatgggatggcggctgggcagagacgctcctcactttccagactgggcagccaggcagagggactcctcacgtcccagacgatgggcggccaggcagagacgctcctcacttcccagacggggtggcggcctggcagaggctgcaatctcggcactttgggaggccaaggcaggcggctgggaggtggaggttgtagcgagccgagatcacgccactgcgctccagcctgggcgccattgagcactgagagaaccagactccgtctgcaatcccggcacctcgggagtccgaggctggcggaccactcgcggttaggagctggagaccagcctggccatcacagcgaaaccccgtctccaccaaaaaaatacgaaaaccagtcaggcgtggcggcgcgcacctgcaattgcaggcactccgcaggctgaggcaggagaatcaggcagggaggttgcagtgagccgagatggcagcagtatagtccagcttcggctcggcatgagagggagaccgtggaaagagagggagagggaaaccatggggagagggagagggacagggacagggagagggagagggagagcgcctaggtttcttctgctgttcttttccaaaacttcttaaattttgatacgtctttctccttttctaatataagcacggaggctctgaatttccctctccattttaatttggctgcattttacagaaaggtgttttggaacttccattctaatttctctcagacagatggcatttttaacttattttgttgttgtggtttgctaaaatacttgcaagttggtacattttgcattttgaaagattttgccaaattaccctccattagcactgtaacaatttgagttctcagcatttctatgtaaaaaatgaattttccccactatctcaaaatactgcacattttgttttacatttgtcaatctgaggtaaaaactggttttaattttaatttactttatatttaccttattgaatgaatcgtgtgtgtgtatgtgagcgtataccatatgtgttcacatgggaattggaacagctagagaaaaaacatcccagggagaagaaacagcaaatgcaaaagccctgaagtcggctgggcatggtggctcacgcctgtaatcccagcactgggaggccgaggtgggcagatcacgaggttcaagaccagcctggccaacacggtgaaaccccatttctactaaaaatacaaaaattagttgggcgtcgtggtggttgcctgtaatcccagctactcaggaggctgaggcaggaaaatcacttgaaaccggaaggctgaggttacagtgagctgagatcacacgccactgcactctagcctgggcaacgagcgaaattccgccacacacacacacacacacacacacacacacacacacacacaaaaagccctgacatgagaactgaagacctttgtggctgggcagagggagtgacagggtgagtctgaggggacaaggtcagaggggtgatgggggcacgttatgtggggcccactgagacgggctgaggatgaggactttggtcttattactaagtgagaaaagaaccatgagagggttaaaaaccagaatgacaagctgagcatggtggctcaagcctgtaatcccagcactctgggaatgttaaggcaggaggatcccttgaggccaggagttttagatgagcctggctaacatagtgagacaccatctctacaaaaaaaaagtaaaaggccaggtgcggtggctcatacctgtaatcccagcactttgtgaggtcaaggcgagtggatcacctgaggtcaggagtttgagaccatcctggccaacatggtgaaaccccatttctactaaaaatacaaaaattagctgggcatggtggtgggtgcctataatcccagctacttgggaggctgaggcggaagaatcaacttgaacctaggaggcagaagttgcagtgagtcaagactgtgctattgcactccagcctgggcaacaaaagtgaaactccatctcaaaaaaaaaaaaaaaggaaaaaaattagctgggcatggtgtaatgcccctagtcccaggtcctcaggagactcaggcaggaggatcacttgagcccaggagtttgaggctgcagtgagctatgattgcaccactgcactttagcctgggcaacagagtgataacttctttccaaaaaactccacaaaaaacagaagagtgatgagatcagattttttttggattaaaaaatataacatctttattaagctatatttcacataccataatattaactctttatatatttatttatttatttgagacgcagtctcgctttgtcgcccaggctggagtgcagtgatgcgatctcatctcactgcaacctctgcctcctgggttcaaacgattctcctgcctcagcctcccaagtagctgggattataggcacctgccacaatgcccggctaatttttgtatttttagtagagatggggtttctgcatgttggccaggctgacctcgaactcctgacctcaggtgatccgcccgcctcagcctcccaaagtgctgggattacaggcgtgagccattgcacccagccaaatattaactcttttaaagtgtatgactggctgggctggtggctcacacctataatcccagctatgtgggaggccgaggtgggcaaatcactgaggtcaggagtttgagaccagcctggtcaacatggcgaaaccacctctctactaaaaatacaaaaattagccaggcgtggtggtgcacgcctgtagtcccagccactctggaggctgaagcaccagagtcacttgaacctgggaggaagaagttttgtgtgtgtgtgtgtatgtttgtgtatatgtatgattgagtgttgagtggtttttagtatgctcacatagtcatgcaaccatcatcactgtctgattctggaatattaccctcaaaaggaactccataccctttttttgtttttcgagacagagtcttgctctgtcgcccaggctggagtgtaatggcgtgatctcgccgcactgcaacctccgcctcctggttcaagcaattctcctgcctcagcctctggactagctgggattacaggcgcccaccaccataccccgctagtgttttgaatttttagtagagacggggttttgccacgttgcaatccgcccacctcagcctcccaaagtgctaggattacaggcgtgagccactgtgcccagcctccatatccttcagcagtcactcccctcagcccccggcagccgccaatttactttctgtctctatggatttgtctagtctggacatttcatattgtagggtccagccctacggggcttagcaggtgttctccccgtgtgcagagatgagagatggtaataaataaagacacaagacaaagagataaagagaaaacagctgggcccgggagaccactaccatcaagttgtggagactggtagtggccccgaacggctgggcgcgctgatatttattgcatacgagacaaggggggcagggtaaggagggtgaatcctctaagtgattgataaggtgaagcaagtcacgtgatcataggacgggggtggggggcccttcccttttaggtagccaaagcagagagagaaggcagcatacgtcagcgttttcttctatgcacttataagaacgatcaaagactttaagactttcactatttcttctaccgctatctactaccaacttcaaagaggatccaggagtacgggaggaacgtgaaagtggacaaggagcgtgacctttggagcacagcaccacagggaggggtttaggcctccggtgactgcaggcaggcctggataatatccagccttccagaagaagctggtggagcagtgttccctgactcctccaaggaaaggagactccctttcgcggtctgctaagtaatgggcgtcttcccagacactggcattaccgcttgaccaaggagccctcaagcggcccttatgtgggcgtgacagagggctcacctcttgccttctaggtcacttctcacaatgtcccttcagcacctgaccctatacccaccggttatccttagggtatattagtaatgcaacaaagagtaatattaaaagctaatgattaataatgtttataataatgattgataattgtccatgatcatctctatatctaatttgtattatgactattcttattctaactattttctttattatactgaaacagtttgtgccttcagtctcttgcctcggcacctaggtaatctttcacccacatcatataaatggaaaaatatagtatgtagccttttgtgtctgattctcttagcatgttttcaagtttcacccatgttttttaaattaaattaaatttttatttttgggggacggagtttagctcttgtcgcccaggctggagtgcaatggtgcaatctcggctcactgcaacctctacctccaaggttcaagcgattctcctacctcagcctcccaagtagctgggactacaggcgcccgccgccatgcccggctaatttttgtaattttagtagagactgggttttgccttgttggccaggctggtctcttatctcctgaccttacgatccgcctgcctcggcctcccaaagtgctgggattacaggcatgagccactgtgcccgacctgctttcttcttttttgttgttaagcctcctccggctccaagcagaaatagcttcacggtctgctgtgcttcagattgaaaactcagacaccctcagggaccagtggggaaagccaccccttagaggaaagtttctcatttgcattacgcagtcctgaccctttccctacctttccccgcccccagcttcaatcaggtctaactgatatgtgagaaaccagacctttaaagtgtacaattgatgagttttaacttacatatacacctgggaaaccatcaccacaaatcaagatagtgaccacaaggtaaaaacagtattcatcatccccaggaagtgtttttgtttttttgttttttgttttttatttttttttttgagatagtcttgctctgctatccaggctgaagtccagtggtgtgattatagctcactgtggcttactcccaagtagctgggactacaggttcctgccaccccatggccattttatatatatatatatataatatatatgtatataaaatatatatatagttatatatatacacactatatatactatatattatatataatagttatatataccatatattatatatactatattatatatagtatatcatatatagcatatattatatatactatattatatagtatctcatatatagcatataatatatactatattatatatagcatatcatatatagtatatataatatatactatattatatatagtgtataatatatactatattatatatatattatatatataaatataattgggtttttttttgtttgtttttttggtagagatggggtcttgctacgttacctcggctgatctcaaactccgggcctcaggcaatcctcctgcctcagcctcccaaaatgctgggattacagtagtgagctaccacacccacagaagttttcttttcgtttttgagacggaattttgctctgtcgcccaggctggagtgcagtggcatgatctcagctcactgcagcctccacctcctgggttcaagcaattctcctgcctcggcctccctagtagctgggattacagacatgcaccaccatgcccagctaatttttttttttttttttttttgagatggagttttgctcttgttgcccaggctggagtgcaatggtgtgatctcggctcactgcaacctccatctcccaggttcaagcgattctcctgtctcagcctcctgagtagctgggattacaggcatgtgccaccatgcttggctaaatttttttgtatttttagtagagacggggtttctccatgttgattaggctggtcttgaactcctgacttcaggtgatctgcctgccttggtctcccaaagtgctgggattgcaggcatgagccaccacacccagccgctaatttttatatttttagtagagacagggtttcaacatgttgcccaggctggtcttgaattcctgacctcaagtgatccccctgccttggcctcccaaagtgctgggatgggtgtgaaccaccacgcctgcagaagttttcttgagcctccttgtaaaccctctgtttttcactgtcccccgcccagtgttacagaccacaagttcttgggatctgaatgcaactgaaattgacttgaggccaaaacagttttcccagacaagacttcattggagtttatgcctgggtatgagggagacagcacaagagaaagagagcaaatttgctggctgactcttggaaaagagccagtagggcttttttattaggcaaagctctggaattgacattagcgggaggatatacaggctgagctgggcaaaacatgtgaggagtagagcactcatgaggacacttgtctggctgcgatggttatcttgagtaatgggccacatggtgttctggcaggtgcaacaaggctgtaaatcaattgttcagctttccttccggagctgggacactcacaccctcggttacttcctaaggccagttcctgaaattctttttttttcttttgtttgagacagagtcttggtctgttgtgcccaggctggagtgcggtggtgctatcttggctcactgcaacctccttctcccaggttcaagtgatcctcctgactcaacctcccgagtagctgggattacaggcgcctgctaccacgcccagctaatttttatatttttagtagagatggggtttcaccatgttggccacgctagtctcgaactcctgacctcaagtgagccacccgcctcggcctcccaaagtgctgggattacaggcgtgagctaccgcgcccggtctcgctattgattctttttgcttccacggacaactttttatttcctatcttccatctgtgagggcgttcaggacttttgggcctttgtgagtaaacagtcaactctgtggagcggagaccctagagaatatggccagagagaaatgtgagctgtactccattggcagctagcaaaactttcctttctttgagctgtctttgcagtggttctagatcttgggaggacggctgtagatgccctgcatccttggttaagtcataaccttggttaaggcttataggtttcacttgggagagtacctgtggtgaagaagttcacaagccaggaataccagctgtttgtcccaactaaaagctggtaatacggctgggcactgtggctctcacgcctgtaatcccagcactttgggaggccaaggcgggtggatcacctgaggtctggagttcgagaccagcctgaccaatatggtgaaactctatgtctactaaaaatacaaaaattagccggacatggtggtgtctgcctgtagtcccagctacttgggaggctgagacaaaagaattgtttgaacccaggaggcggaggttgcagtgagctgagattgcaccactgcactccagcctgggcaacagacagacactccatctcaaaaataaaataaataaataaataaatttatttattttaataagaaatttaatctggtaataagaaatttaagagtagttattttaaagagctttatagttagaagtcagcttaatcaaaagctaatatccaagtttttttttttttttttttttttttttttaagactgagtcttgcttgtcacccaggctggagcgcagtaacacgatctcggctcactgcaacctctgcctcctgggttcaatgaagccattctcctgcctcagcctccccagtagctgggattacaagggtgcaccaccacgcccagctaatttttgtatttttagtggagacggggtttcaccatgttggccaggctggtttcgaactcctgacctcgcgatctgcccgcctcggcctcccaaagtgctaggattacaggcgtgagccaccatgcccggccccaagttttatatatatatatatatatatttaaaagggctttctgacttttctctttgaatcttttttcgtggactagaactttttttttcaaaaacaaaaaaaccctgtgtgcttggtatgaccacttcctttgttcacttcctccctttttctttttttcttctttcttgaggtggggtcttgctctgttgcccaggctggagtgcagtggtgtgatcacagctctgcagctttgacctcctgggctcaagcaatcattccaccttcacctcccaaagtgctgggattacagacatgagcttctatgcccggcccacttcctttattaaaaattatttttccatgatgtgagtgagagcccaaggggagacttctagcatgaagcccagagctccacagcaaacaggagcttgagtttgaccctaagccctcaaccagcgataccccaaacagctgccatttgagtttcacgtcccttttttttttttttttgccacacattcatgcatcacctgcccacttcactgcttaataattttctttaaatcaacccactcttttgtttttaattcaacacatttatttaaacaggagatgtcatttcactccaggaagtggaaaaccagtgtcagttggcacacatagactctaatagtacaaataaatccaatgattcagcaacaacagagaagtgctaaaagcattgggtgaaaggtgttgaggaacaggttggtcaccaggtctcaaggtgacacccacagatgatgcaagaattcaaaggctcacgcctataatcccagcactttgggaggccgaggcgggtggatcacttgaggtcaggagttcaaaaccagcctgggcaacatgacgaaaccccatttctacaaaacataccgaaaattagccgggcatggtggtggtgtgcacctgtagtcctagtactactaagctgaggtgggaggatcgtgggaggtggagattgcagtaagcctagatcacaccactgcactccagcctgggcgacagagtgagaccctgtctcaaaaacaaaccgacaaacaacaaaaaataaaacaaaaaacaaggggagaagatgaccatctgcaagccaaggagagagccctcagaaggaagtctattgtgctgacacctcgaactggaactattgtaaccgcccaaggggttcacgtttcctgctgcctagacagagcccatacatcaaaacaggggaattgcaatagagaaagagtaattcgctgggcgcagtggctgacgcctgtaatcccaccactttgggaggctgaggtgggcggatcacgaggtcaggaaaccgagaccattctggctaacacggtgaaaccctgtctctactaaaaacacaaaaaattagccgggcgtggcggcacgtgcctgcagtcccagctacttgggaagctgaggcaggagaatggcgtgaacccgggaggcggagcttccagtgatgcaatgagctgagaccacgccactgcactccagcctgggcaacacagcaagactccgccttaaaaaaaaaaaaaaaaaagagtgattcacgcagaggagccagagcccgctgtgcgctgtgcgggagaccggagttgtattattactcaaatcagtctccctgagcattctaggatcagagcttttaacaacaacgcggtgggtggggggaagctagtgagccaggagtgttgattgctcaggaatgaaatcatagggagtcgaagctgtcttcttgagctgagtcagttcctgtatagggggccacaagatcagaagagccagtttattgatctggtggtgcccactgatccatcaagcgcagggtctgcacaatgttccaagcactgatcttaggagcagtttagggagggtcagaatcttgtagcctctggctgcatgactcctaaaccataatttctaatcttatgattaatgttagtcctacaaaggcaatctagttcccagacaagaaggaggtctgctgttgggcgcggcggctcacgcctgtaatcccagcgctttgggaggccgaggtgggctgatcacaaagtcaagagatcgagaccatcctggccaacatggtgaaactgtgtctctactaaaaatacaaacattagccaggcgtggtggcacatacctgtagtcccagcaactcaggaggctgaggcaggagaattgcttgaacccgggaggcggaggttgcagtgagctgagattgtgccactgcactccagcttgggcaacagagccagactctgtctcaccaaaaaaaaaaaaagaaaaaaagagggagttctgctttggaaagggctgttttcaactttgtttaaactataaactctttctctcaaagttagttcggcctacatctaggaatgaacaaggacagcttggagattagaagcaagatggagtcaattatgttagatctctttcactgtctcagtcataattttgcaaacacagtttcactgggaggaaataaatttctgttgtttaagccacacagtctgtgatcttttttttttcttttttgagacagagtctcgctctgtcgcccagactggagtgcagtggcacaatctcagctcactgcaacctccgcctcccaggttcaagcgattctcctgccccagcctcctgagtagctgggattatgggcgcgcatcaccatgcctcagcctcccgagtagctgggattacaggcgcgtcaccatgcccggctaatttttttttttgtatttttagtagagacggggtttcaccatgttggccaggctggtctcgaactcctgacctcgtgacccacctgcctcagcctcccaaagtgttgggattacaagcgtgagccaccgcacccggccatctgtggtctttttgatggcagctctagccgactagcctatctccttagctcaatggtcaaagttagctttaccaatcacggcccctgatgggattcaggtaccgagaaggacacagcgtccctgcggagtattcttccccacagctgcaagaccagattttaatcatgaggaagcagcagacgaggccagaaactgggactgtccacaggacaactggccagggctcttcgaacagccagggtcagtccagctgctacacatgtgaggtaagaaaaaaaaaagccaacgtcaggagcctctctgaacctattgtggtttggaggctgtccagtttatttacaaattgaaaaaaagttatatatatataaattattatattattgttttataatatttatattattttataaattaatataattattatgattataaattaaatattttaatttatatataaattattttttatttttgtaaatatataaatctatctatatatagatatatctatacgtatagacacagatagatacctcatgtagctagtgcatacttgaaatgtgactagtccaaactgtgatgtgattaagtgtaaaatgcacagtaaatttcaaagctttagcatacacacacacaaacatacaaagttttaaatatgtcagtaactttttaatatggatacatgttgaagtgataatatttgggatacattgtgttaaatcaaatatattattattaacgttaacttcacttgtttctttttatttatttatttatttttgagatggtgtttcactcttgttgcccaggctggagtgcaatggcgcaatctccgctcaccgcaatcttcgcctcccgggttcaagccattctcctgccttagcctccggagtagctgggattacaggcatgcgccaccatgcccggctaagtttgtatttttagtagagacgggtttctccatgtttgtcaggctggtcttgaactcccgacctcaggtgatctgcccaccttggcctcccaaagtgctgggattacaggcatgagcaaccgcacccggcctcacttgtttctttttagttttttaaattgtagttactatgaacaatgaaatacataaatatatggtttgttagcatgtgatacattctttgggaaaaacgatcacaattgggcacggtggctcacgcctataatctcagcactttgggaggccgacgtgggcagattgcttgaggttaggagtttgagaccagcctgggcaacaaagagagacctcatctttataaaaaattttaaaaattagacaggcacggtggtaggtgcctgtagtctcagctacttggtaggcagaggcagggggcttgtttgagccaggaggttaaggctgcagtgagccgagatcatgccactacactccagcctgggcaacagacagagacgttctttcaaaacaaaacaaaaccccctgttcctcaagcaagatgccagacgtacctgggtcagtccagactcctgacctatgtggtttaggagcagcaaggaggagggaggggtcccaggaaaagggaacagcctacctctgggcctttgcactggctcatcctgcttctcggaatgctcttcctaatacccactctgctcctcccttcccctcccctccttcaggcctttctgcagatgtcacctcagtgaggctttctctgatacgcctgtctaaaactgcaaagcctcctgagtagctggtaccacaggagtacgccaccacgcccggctaatttttgtttttttttttttttggtagatgggggtcccactgttttgcccaggctggtctcaaactcctgggctcaagcaatcctcccaccttggcctcccaaaatgttgggattacaggcatgaacggaggggtgtgaaacccctagttgtcactggtccctgtcacagtctcttctgcccatggctccttaaagggcaggttggcctgtggggagaggtgggagctgggtcagaagggcaccaggtctcaccctcccttctacttgcagccagatgggcagtcacctgggctctgggatgatcctttctgtgcagcgtccgcctgcggtgccactggtgcagggaggcgcgggcctcggagctgagcccccggggagcgcggtctgtttcgggctggtagtgggcaatgtggtgcagcgccccaaaccacgtggtcaggtagtacccagctggggacagaaagggaagtcagctccgccctctcggcttccctggtcgccccaaatccccctgcagtttgcctgccgtccctcctgctgcggggggaggctgtttgggatcccggaggtactggatcgctgggctccagcattctggagttgggggctcaccctctccccgcagctcatctggatctaagagctccataagaaactctacgtccagctgcgtgtccccaatgtccgggctccagatgagttcctcggtcagcgccggcaggaaggcgtcggcccccaggggatctgggaaaaccagaggaaaggtcttgagatggatccccatctcaaggcgcgtagacaccttccatccgatccccaggaccacgagggctggctgcccctccaccttgtcgggcatgacagcgcctcctaccagaatcttcaggaccgcatagattcctcccaccagtgctaccctctcccgcctggctccaactctcaaggctctccccaccacgctagacgttgacccctcccttaccttggttctcgcctcgagccaggcccgcatagacatctctgcacacctccaagaggagcgccaccttgcggcgcggggcgcaggcagcgtggaggtgcgcaaggcgctcgtggatgcggctccgcaaggcgggggcggggctctgcccttccggtcccggcccctgtgcccccggaggccccgcccccgcccgcagggctgtctgtcgccgccgcagccgccgcagctccggtgctcggagtgtgcggagtcgtgtccacagggccggcttcaggggcgccagcaccgcctggcacaccgccgtctccagcgcggggcctgcggggtgtgggggacgggtgagcacaggaccgccaagttgtcccacgcccacccacgcgctccaacaacccaccctggcccacagccacccctgcctagctctggtcccccgtgagtgtagacatggttgtgaacatgtgtggaagagttagcctgggtgtgaacttgcgcgcatacgtgggcgatagaacgcgtgggatgtgtaggaagggcgtgtgggtgcagaaggaaacgtgtgcgcaccgatggagaggacgaagttgcacacttgaacccgtgggggctcccttccagtcctcccattacctggatcctcgtccttcttggggagcccaggacccctgcttccaaagacagccctgatgtaggagtcctttgccaggtgatcctggaggtcagtaaggaggtgccgcacatcctgaagcagctccgtggccgggtccccagacccgtggggacccccagaatctgaggcgatgcgcacccgaaggcttcggtactgcctggccacgtagctgctccgggccctgaccagagactggacgtgaatggtgagcacgtcctcagggccttcctcttcagggtcgtcctcccttccttcctcctttccttcaaggtcttcctcctcctcttccagtaggctggcgagagccggcccaggatggtccacttccgggctgagcgggcctttcacccaggagaccccgtgaggcgcagggttcctgggggctggaagtgaggagggcattcggtcgcctagaacaggggcagcagctccctccccttcagaggcccagggccccgcccagctaacctggatcatgtctctgagcagcctctggctctgtttcttgaggggtctgctccctcccccagcctctgtgggtctccaggtagagctggttcacaatggaaagcaccttccctggggtgtcctgttggaccctgccgatctgcacaggatctggagccagcagaagtgagaaggtgtcctaggtatccaagggaccaaccctggtcccctcaaggcgccaggagacttacttcccagcttcattgctggaggtgctgaggcttagctcctggcccctcctcagtcagacccaggagtccaggcccctagtccccttctcacttaggcccaggcgtccgggacccccagttccttcctcctccaatcctctcctctgttaggacctaggaatacaggcccccatcccctcctccctctgggactacaaagtccaggcccccagctctctctagtctccagttctatattctcctcaaacccagtagtctgggccccaaagccccattcattcccttggagcaaggaaattggcaggttggctgtgccctctttagagaaccgtgcctcacctgtgtgttcatctctgggccctagagtgggagggggcaagagcagggttctgggcagaacatccctgagaataaagaggtgggagccacagtgtcagtggggtgtcttagggaagggtcccccttagtgcctcagatgggtgacctgtacctgctggctgatagaaaggccaggagatggggcaggtctggcatgcagaggttggaggattccagggacacacctgtggtggggggaggaagaaggagaaagtaaacttgagtggtggcagttttctgtcccctgggatgctcttgctcctccattccttcagaatccccccagggaccttcagaacagggaagttcccactctttggagtctccatctttactcttgtgtaccacttatgccaccaacaaggattcattcattagacaaacatttactgagcccttagtcctttctaggcactggagatacagttatcaaaaggcagacaagttcactgccttcctgtagcttaccttttagcggggggcggagggggaaaaggcagaatataaatgaataaacagtcagggtacggtggctcacgcctgtaattctagcactttgggaagccgaggtgggtgaatcacctgaagtcaggagttcgagaccagcctggccaacatggcgaaaccccatctctattaaaaatacaaaaattagctgggcatggtggtgggcgcctgtaatcccagatacttgggagcctgaggcaggagaatcacttgaactcgggaagtggaggttgaagtgacctgagattaagccattgcactccagcctgggcgacaaaagtgagactatctcaataaataaataaataaataaataaaaataaattttaaaaacgagtaaacaaagtggatattgtattgagtgctatgaagaaaatggagtgattgaaagtgaccaagaggccaggcatggtgacttacgcctgtaatcccatcactttgggaggctgaggtgggtggatcacttgaggtcaggagttcaagccagcctggccaacatggcaaaacccatctctattaaaaatacaaaaaattgggaggtgggggcctaggggagggatagcattaggaagaaatacctaatgtagatcatgggttgatgggtgcagcaaaccaccatgacacctgtatacctatgtaacaaacctgcacattctggacatgtatcccaaaacttaaagtacgataaaaaataaataaataaaaataaaaataaaccaaaaaattagtcatgtgtggtggtgtgcacctgtaatcccagctacttgggaggctgagaggcatgagaattgcttgaacctgggaggtagaggtggcagtgagttgagattgggccactgcactccgcctgagcgacagagtgagactctgtctaaaagaaaaaagaaaaagaaagtgaccaaggtgccatcttttaactatgatggtcaagaaaggttacatttctgcagaggcctggaggatggagactaaaccagcccctctaggaaaagcattcatacaggatgaacccaagcagaggtcctgaagctggaacacacttagcatgctaaagacacacagagtgtaacagtgtgtatggggcagagtgaatgaggggcaatagatagagagacaggaaggaactacatcacacagcaccttatagatcatgacaaggagtttacattttgtatctaaggacgttgcatgctctttgcaggatttggggcaggggtgtataacatctgattgatactgaaaaatatcttgggctcagaatggattgtgggaaggaaagggagacaggattggaaatattcatcagatattttggaaacaaagctgacaggtgtttttgttttgttttgttttggcagggtttccctctgttgccaaggctggagggcagtggtgtgatcttggctcactgcaacctctgcctcctgggttcaagctattctcgtgcctcggcctgccaagtagctgggattacagtcgcgcgtcaccaagcccggctaatttttgtattttttgtagagacggggttttgccatgttggccaggctggtctcaaaatcctggcctcaagcgatccacccgcctcgacctaccaaagtgctgggattacaggcgtgagccaccgcgccggtccagctgatagttcttagtgatcaattgactgtgggctggaacctcaggggaggtgccttacctctgggaatcttctggatctggtaggtattgacttctcctggtaaaggtcctgacctcaacaccagggcctggctggggtcacgtcctgtgaccaagaaactctgggggatagagacaaaggccagcgtgacaaaggtgtgcgcagatgtctgttgcttttgcctgactagcatccatttcccttattttgggttccacaccccaaatttcctttagggaaaccctctccctactttcagtccatgtgtgttgggctgacttcccccaagccctggcggggtgggcccatgacctgatctagccaacaggatgagggtgctctcggcccactgtttggttcagggaacaggcatgtgactcaagctcagccaatggacatcttccacaggatttttttttttttgagacggagtcttgccctgtcgcccaggctggagtgcagtggcacaatctctgcccactgcaacctccgcctcccggggtcaagcgattctcctgcctcagcctcccaagtagctgggattacgggcgactgccaccacgcccggctaagtttttgtatttttagcagagacagagtttcaccacattggccaggctagtcttgaactcctgacttcaagtgatccgctcttctcagcctctcatagtgctgggataataggcgtgagccactgcgtgctggagctcttttggaaagacttcatttgttacactggtgttgctaaactggtgggatacagctctgagctgggaaggatgataccctcctgaggaggaagctgtggtagcccccgtttgctgtcgtctccaaacctattccacattccttgcagaattccttgttcacggcattaatatacccagccatgagtatgattgatatatggatcatgattgatataggtggtggttcttagctctggctgtatacgtcccaagagagctgttaaaaatattgctacagccgggcacggtggctcacgcctgtaatcccagcactttgggaggccgaggcgggtggatcacctgagggcaggagttcgagaccaccctggccaacgtggtgaatcccagtctctactaaaaatacaaaaattagccgggtgtaatggcgggcgcctgtaatcccagctactcgggaggctgaggcaggagaatcgcttgaacccgggaggcagaggttgcagtgagccaatatcgtgccactgcactccagcttgggtgacagagggagactccatctcaaaaaataataataaaaataataaataaaaaaattaaaaatattgctacctgggccccatccttttttttttcttttttcttttttttttttttttaatagagactgggccttgctctgttgcccaggctggtcttgaactcctaggcttaagcgagcctcctacctcagcctcccaaaatgctgggattacaggcgtgagtcagcacacccggccagccatctatattttctgaatcagttgtgaaaacctttattttggccggggacggtggttcacacctgtaatcccagcactttgggaggcagaggtgggtggatcacctgacgtcaggagtttgagaccagcttggccaacatggtgaaatcccatctctactaaaaatacaaaaaattagccgggcgttgtggcagatgcctgtaatcccagctactcaggaggctgaggcaggagaatcgcttgaacctgggaggcggaagttgcagtgtgccgagatcatgccattgcactccagcctgggcaacaagagtgaaactctcaaaattaaaaaaaaaaagaaaagaaaacctttatttttcctgtaaaataaacagatgcaagtggtgcctctgttcttcctgcctggaatgcacgcaggtgcttgggcctggggcagcccccgggaagctgtgagagaagtccaagagaattatagctatgctggcctcaatgtcactgcactgctgatctaaagccagcagctgcctttttggttatgttaggaagataaatgcctatttgtttaaaccgctgtaggacaggtgtttgttatattcagtcccaaatatccaaaattccccgcagttgaaagcaaagccaagaaatgggatgaagaggaatttataagtgttctgaagttcaggatccagagcttcttgaaattacatttttttttttttttttttagacagggtcttgctccatcacccaggctcaagtgaagtggcatgatctcagctcactgccgccttgacctcctgagctcaaatgatcctcccacctcagcctcatgagtagctaggactgcaggcatgagccattgcacccagcaataaatagcctttttggtttgcccaatttgtgtcatgtttgtcactagtaaccagcagagtcctaatctagggtgtcaggatgggcccccagctgtgagtactcacccctagtggccacagccccacaagggcctccgcatcctgggtatccagctctggcacatgccacaccccccatgtcctctgcaggcgagtaagtggctctagggtgctgaggacccctagaggggtcctgtctgctttgttcacctgtggtgggaccagcctgggatggacagtgtccagggagtcaggggtcagaggtgggcagtgggacaatgaggtgaggtcaaaggtacaggaaggggcaggcccagggcagaggctcagagatgtgattcaggattctgtagtgagggaggtattggatggaaagggtttctggatgcaggggaaggagggcatagcctcagccctagtagcctcacctcaccccctctgtggggacttcaggtgccttgtcttctggctgggccatcgtcaggttgcaggaagccagtgagtcatgacctggcctctggcagggagaaaggtaagactcaaagctgctctagccctcgggtcatgttcaagatatttacaatcaatatggcagagaccctgaccaatcagaatggaccccagaggccgcttgccgtggcaggggttaattctttattttatttttgagacggagtctcactgtattgcccagactgcagtgcagtggcacgatctcagctcactgcaacctccgcctcgtaggttcaagcgattcttgtgcctcagtctcccgagtagttgggattacaggcgtgcaccaccacgcctgggtaatttttgtattttttagtagagacaaggttttgacgtgttacccaggctggtctcaaactcctgacctcaagtgatccccccgcctcggcctcccaaagtgctgagattacaggcatgagccaccacacccggccggcaggggttaaatctttagtaccggatggtggggaatctggggatcccaggagagaggccagtgtgtcttgcggtgtggggagaggactcaaaacaatagctctttactgaagtggtaggaaatatgttaagatttttaacagccatgggggctgtgtaaatgtgggccagcccttggcaaaacccagtcagcgcctggaaaagttcttggcccagagtaggcagtccctatatctggaaaggtaataacatcccctcttcctcccttcccacaccatggaggggccactgaatctcttcccccagcattttattatgaaaaatttcagacatagagaaaagctgaaagaattgtacaggaaacatccctatgcccactaccaagattctaccatgaacattttactcatcttgctttatcacacatctgttcctctctctcttcatccacccatcaggccccagctcctaaccaggtacagagtcctacgtaggttatcacttagggtggcacttatcccagcagcagtcccaggagcaggagacctggatcgggggaggatccatcctccctccctccctccctcccttccttccttccttccatccatccagtatttactgaatacaggctggaattaggtgcctctgccctggagagagggtgatgaacaggacaggctcctcccctcagggccttccattcttgtttggggcaggtgtagcatatggataataggcagctaaacaaatacattaggccattgaccagaaggccagggtgttattaggaaggagggaggtgggcagggaggcgcaggtgccctgcccaggcaagagcaggaaggaagggaggggaggggaggggagagggaagcagatgcctgcttgtgtaccgtggcaggagaggaggctgtgggcagtgcgtggcaggggtgggtcagggcagctgcctcataccaaagggaggcagcaggggctgaagatgccagatgctcggttcctgggggccctacctgttctcggaggagaggcctgcagtagcaggaagtggagagaggaagctgagcaggcagggggaagaggcggggctggggtatctgaagtcaactttcctccctctttctggggcctcaggcctttagtgacggggcttagaggaagggacactggcaggctgggagtccaggggtcagagccacgagggcccccgtgaggaccctcttgttacccctcactctggatcccggagactttctggttccttagtggcccaagatctaaccccctcccttcagagatttccctgggtgcccacagaaagaaacaggaggccagaccggattgttagttgtttttgtttttaatttgtctccaataagcaatgtcttctgcccatccagcatgggaagtgggtcccacgtgaagggggcccaccacccactttgggagctgaaggcagagactcgggagccctcccggctcagactccccctacgctgggtgtgggttatattcagaggcccacacccacactggggtaggttaggtatggtttacttagccacaggcccccgggggcaggagacagagtgggggcccgaagctccctgtcctggaagagttaaaagttctggggtagccctggccccgtgggggcagttagagatgagggaggttactccttagcccaggagtggttagagacagtggggctggtagagatgcctgtttaagccttggcctctaggaggtgttagagatttgctggggttgggggccagggttgctgggaccccagttttggggagggagctgtaagagattgggggatgttctgagctccccagacaagaactgctggttaagagggggccaggcccggttggggctcagctgtccctgaggagctcggcatcccgcctgggagatgcagctgtcactggggtttctccctctctgttgtcctggcctcgtccttggcaggtggcggggacttcttgggggaagctgaagtgctggggttggggacccccgcccccgactgggcatctatgctggcgtgctccctccggacaaggtcctccagctccttctgcaggagcaaaggtcacagaagtcaaaggtcactgtgcatcatggggtcagaggacccatggggtggggagagggtccagggatggggctcaggacaggctggggttgctcagctcctcaccttccatccaaggagctcagcaagggccaggcagccctggtcgcattcacccagccaggccacgtccctgcggtgcagcaggagatcagagttcccaggcgggctcgcccctgcctgctcctctcatctgccttcgtgcccccgctcccacctcaccctgtcccttccaggctgccccaacccccggcggggcctcacctgtaggccttcttggagtcaaagtccatgcctcctccgaggcccataatcatccccaggaaagggtccgactgtcagggagggggtgggtcaggggcaggagcagggaagggagagctaagagcacagaccctggagccaggtggcctgggtttgtatcctagctctgtgactttgttttttttttgttgttgtttttttggttttttttgagacaaagtttcactcttgttgcccaggctggagtgcaatgatgtgatctcggctcactgcaacctccacctcctgggttcaagtgattctcccgcctcaacctcccgagtagcctggatgacaggtgcccagcaccatgcccggctaattttgtattattagtagagacggggtttcaccatgttggtcaggctggtctcgaactcctgacctcaggtgatccacccgcctcggcctcccaaagtgctggaattacaggcgtgagccattgcgcccagccagctcagtgactttggtcaagtgacttgtcctctctgtgtcttagtttcctgtagaataggggtgatcacaaaaccgcgatggggttgtggcgccagtgagttcacgcaggctaagacttgggacagtgtctgcccacagcgtgcgctgcttgcccggtgaccctgcctacttcccctgaggggaacacctaggagggagcacctgccctagagtgaggctgcccaggaaaaacagacctgagagacccagagcgtggacccaaccccgccccccgcactgtctctcctgacccctgcaccccctcccacctcctcagtccctggaagcccggccttcctatctggcttcagctggtttgagttggaattctatcacttgctcaaaagggcagtgaatgtcccagaggcctggaacccgacccctctggattctagagccccaggttctgagctgaggaatgcaaagtgctggggttccacagtgggggttccctctgaggaaaagggtgagagggaagggggagcctgtgacgacgggggcttgaagaagggctcttacctggccagctttctccttgttgatgagcaggcgaggggtggagaggggtgccctgtggggagggggagctaaggggtcagggtctgtcctggccctgggtgcccagccgtcctcccagccacagcccccaacctacttgctgatgagggaggcaaagggctgcacctgcaaggaggtacccatgaccaggaggaggtccaccttcaggaagtcctgcggggaggggcgtgagcttgggagcctccgcccaggctgcgccaccgctccctcccccgcccccagcagcaaacctccctgccgccccccatagctggggaggtgacctttcctgaggcagggcccaggctgcccccatggggcccagcacaggtggaggcggcggttggggatgcggggaggctggggggccacttactgactgcatacaggagaagaaacgcgctgggaggctctcaccaaaaaagacgatatctgaggtggagacagatggacggacagagacagtgacatggggaggcagagaggacaggtgggagcaatggcagacccggaggccacagtgggagttgggagcagtggggaccggccaggggcacagaccccattctccccaggatggatctggggcactgttcagagagacagaggtggccagatgtgtgcgggtgtggcctttgggagggggtcagggggaggaggggacccccacccaaatccacctgggcaggtccctggccagaggctcaccaggcttcaccaggctctgacagtcttcacacttgggcgtcacctcagagaagatcttctctgggtatggggaaggggaagaaagagaaggcagtaagaggatctgggccggagtctggaggtgcagcacccccacccctcttccactgttaacatgaacacacctccatcacttggagtgtgatgggtgtctcctgaggtgtccactctgctcagaaaagacctctcttcttgttgttgcattttttttgtttttttctttctttttttttttgagataaggtctcactctgttgcccgggctggaatgcagtggcacgatcatggcttactgtagcctcaacctcccagcttcaagtgatcctcctgcctcagcctcctgagtagctgggattacaggtgcatgccagcacgcccggctaaattttgtattttttgtagagacagggtttcgccatgttgcccaggctggtctcaaactcctgggctcaagcaaatctgcccactttggcttctcaaagagctgcaattacaggtgtgagccactgcgcccggccttattggtttgtttgtttttttgagacaggttctcactctgttgcccaggctggagtgtggtggtgcaatcatggttgagtgcagtggtgtgatcatagcttactgcaccaccgacttcccaggctcaagtgatcctcctgccttagcctcccgagtagctgggctcacaggcatccaccatcgcacctggctacattttattttttttagagatgggatctccctatgttgcccaggctgttctcaaactcctgggctcaagtgatccacccacctcgacgtccaaaagtgttgggattacaggcatgagccactgtgcctggccttatttcttattgatttaggaagcttgaaagcatttctggccgggtgtggtggctcacgcctgtaatcccagcactttgggaggctgaggcgagtggatcgtttgaggtcaggagtttgagaccagcctggccaacgtggtgaaaccccgtctctactaaaaatataaaaattagccaggggttgtagcacgtgcctgtaatcccagctacttgggaggccgaggcagggagaattgcttgaacccgggaggcggaggttgcagtgagccgagattgcaccactgcactccagcctgggtgacagagcaagactccatctcaaaaaaaaaaaaaagaaagaaagaaagcatttctgtcacttgcaacccactgaattctaagtcatttgctcaactgtccattcattcattcagcacacatttataaagcattgtttcaatgtcagtagtcggtaattttctttaaaatatttctgcatggacagcatgacaccgtgggtgctgcctgtgacgctgctgtcaatgacacataatgggggtaatgtgaattgtacactgcccccagctgcttgcagttgggctattcaggaatcctcagcccaggggcactcagctggcattttatcagaacagccacactccagaggcccttctgcaaatgctgcagctgtccttatctcacagggacaccagaggctttgttaaatcagcataaagaatgtcagaaatggctttccatgagtggaataagtgacttcttgttttttttttttttttttttttgagacagagttttgctcttgttgcccaagctggagtgcaatggtgcgaactcagctcactgcagcctccgcctcccaggttcaagcgattctcctgcctcagcctcctgagtagctgggattacaggcgcatgccaccacaccaggctaatttttttttttttgtatttctagtagaaacggggtttcaccatgttagccaggctggtcttgaactcctgacctcaggtgatctgcccgccttggcctcccaaagtgctaggattacaggtgtgagccactgctcctggcctactatcatatattaaaaacagccaaagacaggaaatcaggcagttgggctgcagtgagccatgatcacccactgaactccccgcgtgggcgacagagtgagactctgtctcaaaaacaaacaaacaaaacaaaaaaaccccaaagaattgagcaggacagaatgggtgcccactgcatggagacactgctcctggtgctgagaggaggcctgccctcaggatgccctccagcctcacctttcatccagcttagcgggtattcgtgccggcagctggcgctgacgcagtgtgatgtgtagaaggtgccgtgcgcctccaccaagtcctcctgttccagcccggctattcgctccagggtatctatgttctagagggagagatggagggaagaggggtgaggagtgagccaccccttgtaggccagaaggcacagtagggagttgagggccacgaggagcagtgaggtggtggggacaggtggagaagggagggaggagaagcaagtggcagggtttatctgaagactcttctgttcatcccaatggtgccacttaaagggtgacagtcaaggctgcttaaaggcaggggccaggctgggcatggcggctcacgcctataatcccagcactttgggaggctgaggtgggaggatcacttgaggccaggagttcaagacctgcctgagcaacatatcaagacgcttgtctctacaaaaaattaaaaaaaaaaaaaaaaaaaaaggggcccaaacctaaatatctatgaggccaggcccacagccactccacagcctgtgtggcttttattctgcaaattcaggccatttgctttcatttttcagaaaaaaaatgttgttttattagagccagatgctttatttccacctgtcattaattgctgaaattaacatacatttacaatgtctctgttattaatggagccccctcagatgtggcatccttgtgcagtgcgcaccctgcacagctgcatgtggcagctctaggcaagcattaacataaatgaatcaggagggcttactaggtgtggtttgtttgtttgtttgtttgtttgttttttgagatggagtcttgctctgtcacccaggctggagtgcagtggcacaatctcggctcactgcaacctctgactcccaggttcaagagattttcctgcctcagtctcccaagtagctgggattacaggcacgcaccaccatgactggctaatttttgtatttttagtagagatggggtttcaccatgttggctaggctggtctcgaactctggacctcgtgatttgcttgcctcggcctcccaaagtgctgggattatagacatgagccactgtgcctagccatgtttttttatgtatttgagacaaggtctcactctgtcgcccaggctatagtgcagtggtacaatcatagctcactgcagcctccaactcctgggctcaagcaatcctcccacctcagcctccacatctggctgatttttaaaattttctgtagagatggggtctcactatgttgcccaggctggtcagcgagccttctgcctcagcctcccaatgtgctgggattacagtgtgagtcatcatgcctggcccttccttggctttaatcactatcttcccctttagtagccagggtcctttcttactatggcctgtttcatagatggcatattcacctgtgttcttttctttttttggaggcagggtcttgctctgtcactcaggctggagtgtagtggtctgatcacagctcactgtagccttcacctcctgggctcaagccatcctcccacctcagcccactgagtagctgggactacaggcaaatgccaccatgcccggctaattttttatctttttaattatttttgtagagatggggggtggggtggtctccctatttgcccgggctggtcttgaactcctgggctcaagtgatcctcccacttcagcctcccaaagcgttgggattacaggcgtgagacaccatgcccagccactgttttcttttcttttcttttcttttttttttttttcagatggagtttcactcttgttgcccaggctggagtacaatggcgctatctcggctcactgcaaccactgcctcctgagttcaagcaattctccctgcctccgcctctcaagtagctgagattacaggcacccgccaccatgcgtggctatttttttttttttttttgagacggagtcttgctctgttgccaggctggagtgcagtggcgcaatcttggctcactgcaagctccgcctcccaggttcaagtgattctcctgcctcagccttccaggtagctgggaacacaggcacgcgccaccatgcctagctaatttttgtatttttagtagagacggggtttcaccatgttggtcaggatggtctcgatctcctgacctcgtgatctgcccacctcagcctcccaaagtgctgggattacaggtgtgagccactgcgcccggccactgttttcttttaagacagtgagactttccatattaaacaggtgggaatgttcttttctgcacagacatttgtgcgcgctcatttttcttaaaacaaccaccccctttggagcagctgttgtttgcctgtgaggaatgccgctaaaacaggtgctgacagaggacactggcagaggttacgcagagatggctcgcatgtgtggcccagggccaaactgacagcgtttcccagggactccagaaacaacgggaagggtttgtttcccttcaagggcagaaagaatgctctaactgccttctgggctccctaccagcaaccaccttatctccaaagcctacagacaagagtcactgtcactgttcccacacgccctgtaactttcctcccttgcccactattctaaatcttggttttgcctttggtacttgactcagtctacccactgactccctcacatgtgagtgagcaatttgcaaataactgaacagtaagcaaataactgaacagcgtggaaaagaaccaccgaaatacctctgcgttctgttattctttgacaacatggtttttttttttttttcttttgacaggattttgctctactggtccaggctggagtacagtagcttgatcatagctcactgtagccttgaaatcctgggctcaagcaatcctcctctctcaagctcccaagtagctgggactacaggtgtgcactaccatgcctggctaatttttttttttttttttttgagatggagtcttgctctgttgcccaggttggagtgcaatggcggaatcttggctcactgcaacctctgcctcccaggtttaagtgattctcctgcctcagcatcctgagtagctgggattacaggcacgcaccaccacacccagctaatttttgtatttttagtagagacagggtttcaccatgttggccaggctggtcttaaactcctgacgttgactttggcctcccaaagtgctgggattacagacgtgagccaccgcgcctggcctttatataatagtttgtatgtgatgtgtcattttttttctttttttgagacggagtctctctctgtcacccaggctggagtgcagtggggcaatctcagctcagggcaacctccacctcccaggttcaagcaactctcatgcctcagcctcctgagtaactaggactacaggcatgtgccaccacgcctggctaatttttgtatttttcgtagagatggggtttacaacagcaccccctttcccgaacacatacaccgtttctgactccccttccagcttaactgtgttccagggacccatgaccatcttatatgctcagtatatggtgtctccatcttgtccatcatctccctccctgctgtagggaatcaactcagtgaacatttactttgacagaagctgacaaacaagggccagcggggtcttggggtgagtgtcatgacatcaaccacaaaaagcacttggcttcaagcaagctgttatcatatctgagccacgtcctggaataatggtgactctctgggcagaaggtttattctgagcccggagtctccctatgttgcccaggctggtcttgaactcatgggctcaagcgatctcccactttggcctcccaaagtgtggggatcacaggactcctcctcttggaagaaggaggcctccgctgccctctgcctcctaccagccccaggtgggaacacctcgcccacctgagaaatctgaacttaaagccagttgttcctccccctggcggtagcttttggggctgcaggtgccaaactgcaggtacagggagaaaacactagaacacttatttattttcaatgttaccactcttttttgtttgtttgtttgtttttttaaattgagatggagtcttgctctgtcacccaggctggagtgcagtggcacaatcttgactcactacaacctctgcctcccaggttcaagcgattctcctgcctcagcctcccgagtagctggggttacaggcaccaccacacctggctaatttttgtatttttagtagagaccagatttcatgatgttggacaggctggtcttgaactcctgacctcgtgatctgcccacctcggtgtcccaaagtgctgggattacaggcgtgagccaccgcgcccggccacctgttttataattcggggttctgaggtgtgatctagagcttgaattaatactgttgtagtgcatcatgtcatttctatacatattcataaaacaggtagaggcagcaacattttgttgttgttttgatttgttttttgtttctttgaaaccaggtctcccaggctacagtacagtggcaccatcatagctcactgcagtcttgacttcctgaactcaagcaatccccctacctcagcctcctgagtagctggggctacaggcacacgccaccctgcccagctaatttttgtatttcttgtagagacagggtctccctatgttgcccaggcgggtcccaaacgcctgggctcgagctatctctcgctttggcctcccaaagtgctgggattacaggtgtgagccactgtgcccagcccatcaagatttttttactgttaggggtgtgagactctccaaaccagaagccaacaatgtgagccatccttgcttgaatgccccagggagaggcccttggctaagcacctgacgtgtacgagacatgtttataattgggcaaagcacaaaaaactataaaaaggtgccccttccttaaggcacaacatctacttgttggacacgtgtcatagtgtatggattttgttagatgaagtcactttggaaactcgctcataaccaatgtgaaatctggggtgcctatagtgcacacagagtcccttcagccataggctccttccacatcacacatgggatggccctgagaggaggtcactgccaccgcactgcagacctgagagggcagacctgagagggcaaaccttttctggcccctgtttgacggaaggggaaactgaggcagagaagacgtgactcacggcaggtcatgcagcaaggaggcagtaggccaagccctggccccgcattgctggagtccccgcctgagctcttgggcacgcagctctgctcctctgctgaggacaccatgcccgttccacccgcccatcctcctcccaggatgctcgcatccgcctacctgcgtgtagcagcgcaggagtagccccttgtccttcagcaggcgcatgaagtagtgacagatggttggctgcagggaagagcgacagcactgctgacgactgcagggaacagccacaggccactgccgcatgccaggaactgttctaggcactgtgactgttttacccccagggaaccgtcacagcagccgcgtcggggagagaccactgctatccccagatcacagatgaggaaactgaaggacagggaaggggattgtgttgccaaagtcacacggtgggtaagctgcagagctgagattcacacccaggcagcccggctgcagggtcccgggctctcaacggcatcattagtcagctaagcctcgcagcagccctcttcagacagtaccattagcttcacttcacaggaggcaaatcggaggctcaaggtcgtaagatgaagacacgaggaaccaggacttgaaccgaggcagtctgggcccagcacccatgtacttaatggctacataatatttgtctgcagggccttggcggggcttctcatgcgtgccctcccccaacccttcctgtttcgccccctgcaaaacaaagatctcaccttgaactgcccaggatagagttccttggcgagggcgaagaagggttccggatgtttctgtaggagagacagccagagggccagatgccccaggtagcgtgagggttggagccaggtgaccccatccccacccctcacagacgccccttcctgggggagcacaaaccttgaaatagctgatctcaaagatggcctctgggtagggaagatggtacttctctaggttgtcatagaggccggtggatggagagcgaaagtcggggatgcctgcggctaggaaaggggggtcagggagcagttggtctataccatactaaccctcccaggacagggctcagatagggctcctccccagcccttgggagggactccccagttcctgggggtagctgctgggggagaagggttacttacatgtggagattccagctcccaccaaacagatgactctgcgacctggaggagaggaacttatgcaccatatgacaccgtttgctcagtccctacgatagcaccacccatcacagcccctgacatcgtttactccatgccaggccctggggcaagcatctcagatgcatgacgggccttccaatcatctagacggggatggtgttaacatccccattttataaatgagaaaactggggctcagataggggaagaagtcacacaatcaactgcggaagagccagccagcggataaagaatccagtgttgggctgggtgcagtggctcatgcctgtaatcccagaactttgggaggctgaggcaggcgggtcatctgaggtcaagagtttgagcccagcctggccaacatggcaaaacctcatctctactgaaaatacaaaattagccaggcgtggtggcacgtgcctgtaatctcagctacttgggaggctgaggcaggagaatcacttgaacccgggaggcggaggttgcagtgagccgagatcatgccattgcactctagcctgggtgacagagcgagactccatctcaaaaaaaggaaaaaaaaaaaaaaaagagaatccactgttggaaatcacaccaacttggacttgagaaaaggccactttaggataagaaccctgggctgagcagaaatagctagctggtggctggtgagtagccaccaggccatagtaccctggcatctgcccatcagctgatagacaggcacaagtgtgatatgctgtggatcagatgcctctgggatgccctgtccaagggaggacagcaaaggtgaacagagcacaaagcctgccacagcttcagccctgagcttcagctctgagatgccatcaggccaggcctggttgaatccagtggtggctacatgtggtctggattcaggggacctggggtcaaatcctggctctgccacttggcaactgtttgaccctacactgagtcgtgacctttttgtgcctccttttcctcctctgttcagatcacttccataatgatcttacaggtataatgtgaatatcaaataatagggcacttgtaaagtgctgagcccagtgcctggcaaatagtgaagcctcaattaagtggttaaaaagaaatttttagggccgggcccggtggctcactcctgtaatcccagcactttgggaggccgaggggggcagatcacctgaggtcaggagttcaagaccagcctggctaacatggtgaaaccccgtctctactaaaagtacaaaaattagccgggcgtggtggcacgcgcctgtaatcccagctactcgggaggctgaagcaggagaatcgcttgaacccgggaggcagaggttgcagtgagccatgatagcgccactgcactccagcctgggtaacagagtgagactctgtctcaaaataataataataataaatttttagagcagtgaggtgagggttggagcctcacctttaaatttttgcagagagggggtctcgcttattgcccaggctagtcttgacctactggcctcaagcgatcctcctgctttcagcctcccaaaatggtgggattataggcctgaaccaccactcccggcctcaactaattgttatttttcattactatctcctcctgggcaccctcatgagccaattaccccagaatccaggtgcaggaggacacaaggaacaaatgctttgtagccactgcctgtgttgtctttggggcctgcccaggctaaaagatggctgcagacagctgctcgcctgccgcaggagagggaggctcagggcagcaggcctggctgcctgaggagggagacagtggcagctggaggacagggacacaggagaagatgtcctcaacaaaaggctgctcaggaaccacaaagggtcgattgttctagttgaggactgccaagggcctggtttctcagactttggtgacctcaacttgtggcaagaaatataaatttcaggccgggacgggtggttcatgcctctaatcctagcactttgggaggccgaggagggtggattgcctgagctcaggtgttcaagaccagcctgggcaacatggtgaaaccctgtctctactaaaatacaaaaaattagccagtcgtggtggtgtgcgtctgtaatcccagccactcgggaggctgaggcaggagaattgctggaacccgggaggtggaggttgcagtgagctgagattgtgccactgcactccagcctgggcaacagagcaagactccatctcaaaaaaaaaaaaagaaaaagaaatataaatttcatgctgactcagtaagtggacacctatccaccacatctgaaataagcctcctgtagtaataaccacggcacaccctgccacagctctcgctatgttccaggccctgctctaagcatttgcatttttatttatcttttaaattttattactttatttttttttagagtcagagtctcactgtgttgcccaggctgcagtgcagtggtgccatcatagctcactgcagcctccaattcctgggctcaaacaatcctcccttctcagcctcctgagtaactgagactacaggcaacgcccccatatctgactatttttttttttcttgtagagatggcgggggggtctcactatgttgcccaggctggtcttgaacgcctggcgttgagtgatcctcccacgatggcctcccaaagtgctgagattacatacatgagccactgcccctggtcctatattaatttatttagccccgccaataaccttatgagttagatactataatcattatcctcattttatgaaacaggcctggtcaatcagagtgcagtaattcactcagcaatggagaagcgacccaggtctggccaatcagaggcatgggggcaggcatttgactcaaccgggaccaatgggagccaatctctgctgtttggtttgaactactgggaaaaggtgctctctcggtggcagctcctaggctagtggaacctgcatttgcagctgccaggagttacctttaccccaaaacaagaaaagcagcatcagagagagttatgatttttaacaaagtggaagcacctggacccagccgtgcttcaagctggattagagccaacacactcctttttggcttaagccagttccagctgggtttcttgctacttataaagaaaaggtttcaataaatggttcaagtggctggggatgggaggtcacttggggccaggagccaggcaaagtggcccaatcctgacaggggactcacagcgttcgctctgcatgtaccgggccaccccttccaaggtcagctcgtccagcagacgctccttctggctgcccaggctgagcgtctgggagaataagttccgcaggaagtccactgaccggaaagaagagagacagcggcaggacgggcattcagccaggggcatggatgtctccggcaccctggccccagccctggggttcccggcctccccacatctaaaggcacaaggcccggcccagccagcggcctccaggagcctgctctggcactggtacccaacccactgctacatactttggatgtcactcctgatggagttgaggaggtatcacccacacccctgccctgaaatccccccgccccccagaaccctgctccctgtccctccaggaagatactcactgtctgcttctccaccagcggctcctccctcagagtctgaatctgagtcctggaaggggtggggtggagtggccaggcccgagaggtgggattagggagggaggagagggggtgataccaggtttggggaaaaggctgtggcaggaaggtggcctgaggaagtgcggggtggtggagagactgcactggggctagctccagggctctgggacaggctgccggggttggagtcctggccatgcccgtccccaggagcaagacctcatgtgagtggctttgctttgcttttcttttttgagacagtgtctcgctctgttgcccaggctggagtgcactggtgcagtcacagcttgctgcagcctcaacctcccaagctcaagggatcctcccacctcagcctcccaagtagctgggaccacaggcacgtgccaccatgccaggctcattttttgtttgtttgtttgtttgctttgtagagacgaggtcttcctctgttgcccagggtggtcttgaactcctgggctcaagcaagtctcctgcctcggcctcccaaagtgctgggattacaggcgtgagccactgtgcctggtcgtgactttgattttctaagtcttggtgtccctcaccttggaaagggagcttgggtgctgggcgcagcaccaggggcgggggaagtgcttggtaagcgctggctgttgctgttattatcacagcctggggtcttcccttcgttcccgggtcccctggagcgtgggcctgctgtcccttcccagcagccctgggggcctctgaataatgtcccaagtcactctgggaatgattccaatgcaaagccttggccctcacttcaaggacctatgtgccccctgctcgaggcctcagacactctgcccacctctccagcaacctctgtctccttcctcgaagcctcccctcagcccagctccagactggcaggtctctgggactctgtccagggcctctctgctttctctttccactttcctggggttacctgtctcatccatgccaatgacctctgcctcgtcactcatgataccatctctctgccctcagatccggggttccctggcttcctggacaccttgccctaggtgccccccagcctctcactcctactatgtcccaaatggaccctggcatctcctccaagcccatcctcctcccaggcctcatctcaatgcgatcgtactgtcccccccatcagccagatgtttcctgcccccgcctccctcctcgccctcctgccacagcccttcagctccagagcatgtacgctgagcctcctaagggtctgtccaccaaccccctttccctccccggcgctccacctggtccagcctgtcctctcctccgggggtcctgccccagcctcctcccccagcctcccagcctcagtctccacctcccatccaccctgctgccctgcatgtgaggctgtctgggtcagctcgcccctctccacttcaaaggcccttctctctggcttctgcagtcttcccagacatctatggaattgccaggatgtccacaagggcagggactttgtctgggtgcccagcactgagaacagggtctggctcctggcaggagctccaggagctcctctaccttggaatgaatgcctgcttcaggctggaccacggctgggccctgcaatggatttcaccaaaatgcagttctgaccaagccaccacctcagacaactcccttccccggatactcactgctctgcgtccaagtctttttgaataagaccctcccttccgaacatacgacaatttaaaaaattgctttttaagactgtgcaactccggctgggcgtggtggctcatgcctgtaatcccaccactttgggaggctgaggcaggaaggttgcttgatgccaggagttcaagaccagcctgggcaacacagtgagactctgtctctatttaaaaagagagagaaaggctgagcacggtggctcacgcctgtaatcccaacactttgggaggctgaggtgggtggatcacgaggtcaggagatcgagaccatcctggccaacatgatgaaaccccgtgtctaataaaaatacaaaaaattagccaggcatggtggcacgtgtctgtagtcccagctattcaggaggctgaggcaggagaatcgcttgaacctgggaggtggaggttgcagtcagcgagatcaccccactgcactccagcctgggtgacagagcgagactccgtctcaaaaaaaaagagagagagaaagagagagtgagaatgagagagagagagagacagagagaaagagagattggacaacctctgcaaaaaccttgattatactcatgtatacttcaacaacatataacttgcggcactcaccttgtaattgcccaagcccacccttataaagataaccactgttagctaagcttaatggaaattactccagttttctctgcataaaactaatattttttacagaaataggtcatagtacaatacaacatcttgagttttcggcagaacaatatgctacagacccacctaatttaaaaaataattttttaaaaaagagacggcatcttgctatgttgcccaggctggtctcaaaactcctgggctcaagtgatccccctgcctcccaaagtgctgggattacaggtgtgagccaccgtgcccggcctcacctcgtttttcagagcagctacatagtattggattgtatggatgaaccatagttcatttaacccatccactgacagccatttggactgtttccagttttgccctgtgacggacaatgctgcattttacatcctcgcctctctctctttgggactgaggatcctttttaacattcaacctttttctctgacagtggtcgtgctttgggagccaggcgagtgagttgccacagcctaacaggaggctcttatatccttagcaaagctccactgtgcatttgtgaggtattctgatgcccgcttctgcaccaccccacgtctgaaaggcaatctcaggggtgtgggtgggctggcactctttcaggctgtacacagtgaggctgtgtggaaggcctgtgcccagcatgtgtctgcagcttggcctaagggagagccggaggtgctgacgggggccttcaagctcctatgagactgcctgtccacctctcctggcagcctctgacaggtggcgtgcccagtgctgggggactcaaacccttccctgctcctgtagccgagggacgggggataagtgacttaacaactctgcctcagattctgcatctgtaaaatggccgtgataggcgtttctcttcacagggatgccaggaagatgaaattgagatgaggcacgtttggcactaaacagtgggcccagctttagtaagccgtcagtaaatgctaaccacgactataacaagctgaccaccaccagccacccaattatggaacacatcacaccccttcatgccccccaggtctttgcacaagcgatacctgttgtgtggatcaccatttctcaccttgtctaagaaaattctaagtcactcttcacttatgctgtgtctgtatcttggtctgacagctagaccagcctgtggattcctccagggaatggcctggctagaatcttctttgacccagaaaattttctctgtgctcccacagtaccctgagtttctttacttttcttcctttttttttttttgagaccgtgttttgctctgtcgccccggttggggtgcagtggcacagtcaaggcacactacggccttaacctcctgggcttaagcaatcctcccccaactcagcctcctgagtagctggcaatgcaggcatgcaccactacacatggctaatttttaaatattttgtagaggtgggggcctccctatgttgccaagactggtctggaactcctgggctcaagcgatcctcctacctcagcctcccaaagtactgggattacaagcatgagccactgtgtctggccctgagttactttctttcttttttactttttagagaaagggtcttgctctttcaccccggctggagtgcagtgatgcaatcatagctcactgcagcctcaaactcctgggctcaagcgatcctcgcgcctcagtctcctgagttattggaattacaggcataagccactgcatctggccccctgagttactttcgtcatcacgctgtgagatcattttttcccatcacttgtccacgagatctgtgcgttccaagaccaaatgggatacctgtctcttccagtcccaggacaaatgtggttcagaagggatggcaggcagtggcaaggaagaaggaaagtttgggaggacaggcctggacttgaggctggaaactcttctctgacaatccccagaatctgcctttccccagaaagctgcactgggtggtgtgagggattggggcaatgagccgagggccctggggtgactgtttcccctttgccacctccccccagtgtgggatgtggaacaagtccgtctctctcctcccctccaccctttcccccatctcacctgagcctcctgcaccttccctgcctgggtctccagagggtgagaggctgggggaggggagcagaggtggttacagtggggagaacgattaaggggggaataaaggggttcaaatggtcagtgagggggcaagaacacccaccaacctagttacactgggatgggatggtggtaaaaatggagcagagggagggaggggacggagaaaagatcttatctacatgcaaagtgatgccgggagaggtgattagtgaggggcagagaggctggagaggaagatttagggggacagggagaaagtaggggcttttgcccaggctggtcttgaactcctgggctcaagcgatccaaccaccttggcctcccaaagtactgggattacaagcatgagccattgtttctggccctgacttactttctttcttttttactttttagagaaagggtctcgctcatgtcacccaggttggagtgcaatagtgcgatcatagctcactgcagcctcaaattcctgggctcaagcgatcctcctcctcctacctaggggattcagggcatgaaggaacactcaggaggagttaggaaggacacgacagtgtgtgagtgtgtgtgcggggagggttagatttacaaggcagagggaagtttagaaaggaaaagagaagggaagagacgctttggctgggaggcaggtttaggagggaggtgcagtggtgcagtggaggcggtaggtttaggagaggcgcggaacaaggggaagccataggaggggtcagcaggggtccctcagcatcctctggttgcctctaacaatcaggtacccatagcaagcgggaccggggcaacttatgttctttgcagcgagggaccttagcaaccaaggtgcgagaaacacgcgatcattggcaacttggcaagtggatgtggtaaacgaaccctgaacacactgcgacccagaaacccaccagcctagcgatacagatcgctaagcaacagccctcagaatcccactccccgaagcgctccctacttcccgccccaccgcggccacccttgggccccggggcctgcagcattcagccaggccccggcgcggcccgaccctcctacccggatccccgactcacggtctggctctgccatgggcgcggtgctgaagcccttgaggctgtcaccgaccgctctgtcccgtcaccaaccactgtgtcccgtcaccgactgctctgtcctgtcaccgactgctctgtcccgtgacggcaccagaaatgggagtggccgtgatagggcacagaactacaactctcagcagacattgcggccgcagacgcgctttcgtacaacacccagagcgccccagttaggtaagaaagcgcgcgaggaccggactacgagtcccagaaggcgtggcgtcagcagccatgttggtaaagggcgcccggaaaatgtgggaacggctagagagttgtagtcctcccgaatactctgattggtcaggatgcagtacgagggcggggtgtgagcgattcagcatattatcattgggtgaatcagggggcgtggtggggaatttcccgcagggcggaagctccagaactcccggcaaagcccagctacaggcgggcgactgcggggggcccctgaggcggcgggggccatggctggggtcgcgtgcttgggaaaagctgccgacgcagatgaatggtgcgacagcggcctgggctccctgggtccggacgcagcggcccccggaggacctgggttgggcgcggagttgggcccggggctgtcgtgggctcccctcgtcttcggctacgtcactgaggatggggacacgtgagtgaaccttaggctgccaaacggagccctaggacccggcgtcacattcctcattaatctctgatccctgaggcttcctaacctcatactcctaaatctgacttccgatgctgaacttcctgacctctaacccccgagtcctaacttttaacaaaaccaatcttctatctagctatgatcctaacccaatcatttcttaccttcttttcttgaactatgattctcagctcctggaatccacattgtatccactgatacccaaacctgactccagtcctgagacttctgttagaactgtggcttctcctgacttctaacctccaaatatgatctttgattcttagttcccgatttgagccctagagtttgatttccgaaattaatacttggtccctgactctaagatcctgtcttctgagcagtgttcttcaaatcttaaattcaaagagagagaatgtaagctcttctatgttgaattcctaattaaagtaaaaaaataggaaaattaaaaaaaagaatgttagctccatgagaccaaggattcatctgttaaacaaatattctttacacattaccacgttccaggctccgtttaggtgctagtgataaaggcagtgaagaaaacaaacaaaaacttaagcccttgtggagcatacattttagtggagctaaataaacagattgataagaccacaaggaaggaaagaaatggaaagacaggaagaaacaaagaaagacacgcagaaagaaagaaacatagaaagtaagaaaaggaaataaagtcagaggtagttaagtactttggagaaaaataaagcaggaaaatgaggcaatagataaacaagataagagcatttcaaggagaaggaactgcagttgcaaaggcccagatgagggattgtactgggttttttgtctgttgtgtttactgctgtatgcccagtgatgcaagcagggcctgatccaggaggcactgaatattgatctcaaccagctttatagtctcgttaattttcattaaatttcattaattaattttggtttcattaatttttttttactttctattcaattggtctctgttctgacttttttttttgaaacgaagtctcactctgtcgcccaggctggagtgcagtggcatgatcatggcttactatagccacaacctcctggctcaagtgatccttgcacctcagcctcctgagtagctgggaccacaggcacatgccaccatgcctggcaaatttttaaatttttttgtccccctatgttctcaaactctttttttttttttgagacagagtcttgttctgtcacccaggctggagtatagtggcactatctctgctcgctgaaacctctgactcctgggtttaagcagttctactgcctcagcctcccaaatttgggattacaggcacgtgcccccacacctggctaatttttgtatttttagtagcaacagcagtttcaccatgttggccaggctggtctcaaactcctgacctcaggtgatccacccgctgtggcctctcagagtgctgggattacaggtgtgagccactgtgtgcagctgtggtctcaaactcttgagctcaagcattcttcccaccttggcctcccaaagtgctgggttacagggatgaaccactgtgcccagacagtctctgccttttaattagtgtttagaccatttacatttaatttgatattgatatgattgtgtaaatttatcccatgtctattatatatattctacttacctatgttttctttttcctccctcctttttgccttttattgggtatagtttttgttacttttttttcaatcctgctccttctgtatagtgtttttcattttatttctttttttttttttgagatggagtctcgctctgtcacccaggctggagtgcagtggtgcaatctcggctcactgcaagctccgcctcccaggttcatgccattctcctgcctcagcctcccgagtagctgggactacaggcacctgccacttcgcctggctaattttttttgtatttttagtagagacggggtttcaccgtggtcttgatctcctgaccttgtgatccgcccgcctcggcttcccaaagtgctgggattacaggcgtgagccaccgcgcccggcctcattttatttcttttgtttgcttattagatattcctctttttgttatgttagtggttgctttaaggtgggggttggcaaactatggcctccaggcaaaatctagccagccatctgcttttgtatggttgtgagctaagaatggtctttacatttttaaacagtttctaaaaatcaaaagaataataatattatatggcttttgtatggttgtgagctaagaatggtctttacatttttaaacagtttctaaaaatcaaaagaataataatattatatggcaagtgaaagtgtatgaaattcatatttcaagctccataaataaagttcttttggaacgcaagcaagctcactcatttacatattgtcagtggctgcttttgcactgacacagcagagtcgagtagtcaaaagaaactgtatggctgctgggctcagtggctcatgcctgtaatcccagcactttgggagccaaggcggacagatcacaaggtcaggagatcgagaccatcctggctaacatggtgaaaccttgtctctactaaaaatacaaaaagttagctggcagtggtggcgagcgcctgtaatcccagctacttgagaggcaggagaatcgcttgaacccgggaggcggaggttgcagtgagctgagatcacgccactgcactccagcctgggcagcagaacgagactccatctcaaaaaaacaaaacaaacaaacaaaaaaagaaaaagaaaaacaaaaccaaaaagagaaaccatatgacctacaaagactaaaatagttatctggctccttacagaaaaagtttgctgactcctgctgtagggttgatagtttacaactttaggttatcatgggctaccttaaagtgatattatgccatttcacatagagtaaaagaaatttattttattttattattattatttgagacggagtctcactctgttgcccaggctggagtgcagtggcacgatctcagctcactgcaacctccatttctcaggttcaaatgattgtcctgcctcagcctcctgtgtaggtgggattacaggcgcatgccaccatgcctggctaaattttttttgtattttttgtagagacagggtctcatcgtgttggccaggttggtctcaaactcctgacctcaagtgatctgcccgccttggcctcccaaagtgccaggattacaggtgtgggccaccgtgcccagcataatgaactgttttaatattcttgtttgcaaattctaacatctctgtcatttctgggtcagtttcaattcactgatggttcctattatggatcatgttttcctgcttctttacatgcctgataatctttggttaggtgccagacattgtgaattttgccttgttagtctggagaattctgtattcctataaatattcttgaggccgggcgccgtggctcacacctgtaatcccagcactttgggaggccaaggcgggtggatcacgaggtcaggagttcaagatcagcctggccaacatggtgaaaccctgtctgtactaaaaactgcaaaaattagccaggtgtggtggcacgcacctgtggttccggctactcgggaggctgaggcagaagaatcgcttgaacccaggaggtggaggttgcagtgagccacgatcgtgtcactgcgctccagcctgggcgacagggcaagactctctctcaaaaaataaaaattaaaataaataaataaataaataaataaataaatattcttgaatattattctgggatggagttaaattactcggaagtagtttgagtctttccagttttgcttttatgatttgttaggtgggtgttgagcagtgccccatctacagttaattattccccactattgaggcaagaccttcctgagtatcccacccgatagcctgtgatgatgtttttccagcctggctggtgggaacactcactattcctggccctgtgtgagtaacgagcacttttctgaaatccttttggatggttttcccatccccacagactcacaggcatggctgatccgtattctccggaatacacaagagaacctcctgcagttccccagcaatctctcctttggcaactctgttttgtactctgtcctgtgactctagccacgctggcctccacagactcttcctccatatccatctcctgacctcagacaacctgatgcgctctgcttggattcccctctctgcaccgtggctttgaaactctctcaagacaataagctgtggcagtcaagtgtggggcccacctcgtgtttcctgtctttcaggggtcactgtgattcattgcacgatgtccagtgtcttcaacactgttgcttcatataccgtatttcgtctgactcttgtttgtttgtttgtttgtttcacgtgggagtgaattctggtccatgttacttcattttgggcagaagtggaaatcccactgaataaacattgattccacgaatttgctgatgaaactctgacctctgacctcccagatagctgacagggggttccagaactgtggtcacaaggcctagcatacagtaggcgccccatgtttgttcaatgaaggaatgcaagaggacttgaactttgccctctcaccccggtctttgtccccagggcactgcacttggctgtgattcatcagcatgaacccttcctggattttcttctaggcttctcggccggcactgagtacatggacctgcagaatgacctaggccaggtgagccacgagggatggtgtagggcttggggtccagggttcccagtgtgactccctaccgcctgtcctctgcttctgcagacagccctgcacctggcagccatcctgggggagacatccacggtggagaagctgtacgcagcaggcgccgggctgtgtgtggcggagcgtaggggccacacggcgctgcacctggcctgccgtgtgggggcacacgcctgtgcccgtgccctgcttcagccccgcccccggcgccccagggaagcccccgacacctacctcgctcagggccctgaccgtactcccgacaccaaccatacccctgtcgccttgtaccccgattccgacttggagaaggaagaagaggagagtgaggaggactggaagctgcagctggaggctgaaaactacgagggtgagggtcgtcaccagggaaggactcagctcctgggctaggcgagagcacctggccctgggctcagcttccctgatttgagactgagctccttgggaaatcatgcctaggcttcaggagcccacacatcgggaccagggacctccactcagggcccagatgattgagaattggatatgtaggacccaggacccccacctggaggccccaggtcacttgggatgcagacctgtcacccacagacccagagctgccaggatccagttgtcgggcccccgggctccccacctgcagagtgtattgcagacccctaccctacccaggaccggggaatgcagagctcaggccctctgtgaaactctggcaccccaggctcccagcaatgggcagcagggttcagagacagccctcctcagcctcatgggaagaagggctcatctgcccacagccctgacatccaagtttctgctcccctgcctataagcccagccacctgagaccagacccctcctcagatggactgacgtcattcaggacccagtgttcagggcctgcctctcgcccccaggtcacaggcttttcagctacttggtaccttttttttttttttttttttttttgagacagtctcactctgttgccaggttggagttcagtggcgtgatcttggctcactgcaacctccacctcccaggttcaggtgattctcctgcctcagcctcccgagtagctgggattacagggattacaggcacatgctaccatgcccagcttatttttgtatttttagtagagacggggttttaccatgttgaccaggctggtcttgaactcctggcctggccttaggtgatctgcccgccatggcctcccaaagtgctgggattacaggtgtgagccaccgtgcctgggcaggaaccttaatttaaggtttttttttttttttttttttgacatggagtctcactctgttgcccaggctggagtgcagtggcgccatctcagctcactgcaagctccgcctcctgggttcacaccattctcctgcctcagcctcccgagtagctgggactacaggcgcccgccaccatgcccagctaattttttgtatttttagtagagatggggtttcaccatgttagccaggatggtctcgatctcctgacctcgtgatccacccgcctcagcctcccaaagtgctgggattacaggcgtgagccactgtgcctggcctttattttttatttttagtagagacgtcttgccatgttgcccaggcagcttcttgaactcctgagctcaagtgatcctcttgctttggcctcccaaagtgctgggattacaggtgtgaaatagcgtgccagctcaggtcctttgagtgataagagcagagacttgggtctcctcctggccccaaaatccaggctccctgtccacagaccccaggctgtttacccgcgggccccaggcttcaaacaactcaggcactagcacttgccagcaagctcaggccatctgagataggcatttggtacccaggtacctctttgccatacccaagaattcaggaaccagcccccaaacctaatcaccctcacgccacatgaccctcccccaggatcaaagcacggtggggtggggggggccctcacctcatcatctgacgccaatcactctgtccccaggccacaccccactccacgtggccgttatccacaaagatgtggagatggtccggctgctccgagatgctggagctgaccttgacaaaccggtgagccccaacctcggggaagatgccgtcggcgggagggggcttgtcccctcttcgggccctctgacctttctgttgcacccccacaggagcccacgtgcggccggagcccccttcatttggcagtggaggcccaggcagccgatgtgctggagcttctcctgagggcaggcgcgaaccctgctgcccgcatgtacggtggccgcaccccactcggcagtgccatgctccggcccaaccccatcctcgcccgcctcctccgtgcacacggagcccctgagcccgagggcgaggacgagaaatccggcccctgcagcagcagtagcgacagcgacagcggagacgagggcgtgagtcaggaggagagacagggcagcccagctggggggtcaggatagaccggcaggcaagaagcccaagaagataattaggcaccgaccttgggctgctgttagagaactcaggcagcagcgccagtgacacggggcactagtcaggagagacctggacaggggtggtgggaagagcttgggcagaagtggctgaaaaactaaggcagtggcaaaggtagaactcaggcaggggtggagaaaaggcgttggtcgcagtgattggtgaacacagcgggggtgggtggtagcgctgggggtgattttaggcagcaagaattggagaactcacactgcgaaaagaaaaccttgggtggcagtgatttgaacaccggcagtgctggggcaggacccgagccagcggtggggagagatatagtcagagaacccagcaatacagatccgtccttgggcaaggcgcggtgctggatgatgggtgcggaggaatttgggtaaaggcagagggaaggggtggaggagggccagctcagttgccgaaactctggagtggcggctggctagaaattggtctgtagaaatgaccttgaaaatggagttctggccaggtgcggtggctcacgcctgtaatcccagcactttgggaggccgaggcaggcagatcacgaggtcaggagttcgagaccagcctggccaacatggcaagaccctgtctctactaaaaatacaaaaattagctgggcgtggtggcgcatgcctataatcccagctacttgggaggctgaggtaggagaattgcttgaacctgggaggtggaggttgcagtgaacctagatcacgccactgcattccagcctgggcaacagagcgagactccatcttaaaaaaaaaaaaaaaaaaaagaaagaaaagaaaatggagttctgagagctaggaaactgggaggttgagccaggagcaggggaacttgggctttgaggcgagacctaattcttagggtgctctatgaggacatgggtggtgggcaaagtgacagccgcctgagcccctctgcctggtcccctttgcccccaggatgaatacgacgacattgtggttcacagcagccgcagccaaacccggctgcctcccaccccagcctcaaaacctcttcctgacgacccccgccccgtgtgatttgtttcattgttaatataatttccagtttaataaacaaaaccctagttctgacaaccagagaccagactgatcttgtcttcccagtcctccgggtccttctggggcccatccctgtcacatcaagtgctgctcacggaggcagggtgcgtttctttgtgctttattcactcagaagggttggagtgggagtgcataggtgtgggggtgcttcctgtgtcagggctgagcccagcccccggcccagctcagactcacctccttgggtgtggttccaaggcacgtccgcctcctcccctgtttgggtaggggtggcgtggggtgctaggtgaggtggaggcttcggggtcaacagtcctaagccacagggtgtgtcaggaggaaggagggactgaggtaggggtcagccctccctcctgagctgctcccccagcgtctctgtcaccttcttcagttcgtctctcaagtgctccagctgctccacctccttttcctggtggggtcagaaacggggtagtcagcacccaccttcaaaggcaggccacctcggtcactgtgattgtgggccatgtcggttctcatagtggcatccagcagcggtcgttctgatcgtcgtggaccgcgatggtgaccatgctgattgccataaccccggaagagtggtgctggctaacgcgaccacagccaacagcagtagcttggcactggcaaaggtgcctgggatgagcacctcgtgatggcgctttatttttatttttaagatggagtctcgctctgtcacccaggctggggtacagtggcacgatctcggctcactgtaacctccacctcccgagttcaagtgattctcctgcttcagcctcccgagtagctgggattacaggcatgcaacaccatgcctggctgattttttgtatttttagtagagacagggtttcaccatgttggccaggctggtctcgaactcctgacctcaggtaatcctcccgcctcagcctcccaaagtgctgggattacaggcacgaaccaccatgcccagccattttttttttttttttttaagatggttttgctctgtggcccaggcgggactgctgtggcacaatcatgactcaatgcagcctcaaactcccgggttcaagcaatcccaccacctcagcctcctgagagctgggaccacaggcgtgcgccaccattgctggctaattttttaaattatttgtagagtcacggtttcactatgttgcccacgctggtctcaaactcctggcctcaagggattctcccaccttggcctctgaaaggattaaccctccctaggattacaggtgtgagccaccatgcccaccctgttacggcacttttggtgccaccaatcatggtgacatcttgttttccatgacccagcaatggtgtctgtctgtcacctagtgaagtaggcacagcagccacttttcacagtggccaacttgctagtgatggtggcttgcttctgtgcaatggtgccatcttggttgctgtagtccatacagtagtgtggaagtataaggtaaaggccttgcacggaagttgttagccagtcgtggtgtcagtcttggccactgtgatccactagtgatggatctggtggtgcagggccaacaccggtggctgtgagttgtgactccactgaccatcatcaaccctgcctccaaactgtgttggtgttcctccttcatccccctactcacctccctctccgaagcctcctccttctcctgcctgggctcagcctctggctggtggtggtggtggtggtggtggggcaagtcctcgcgcctctctcctccgcctctctcggccccctgccacaggctgcggtccccgcccagcacccgcacccccttctcctctgcctggaactgggccgtctctttgtcactggccttctctgccacccgcttctggaggtcccctccattctctagatgccgctgccacaggtcctcaaaggtctccatgggccccctcttcctctcctccttctcctcctcctcgtcctcctcctggtggagctggcgatgcccttgcatgcggatggcttgttcctggacctcagacttgtgggtcctctctgctacctcctcctcttcctcatccctcacctcctggctggacctcatcttcccagcctcctgcttcttgaaatccccaagcagcaggcctttctcctcggtggacgcacagccgtggggctctgtcccgcacaactctggcagaaagggaaaggacactctctaagcatccaattgggaaactgaggccgagtatggaggctcacgcctgtaatctcagcactttgggaggccgtggcggccgatcacctgaggtcaggagtttgaattgggaaactgaggccttgaggagttctgggccctgccgaaggtctcacaggggggctgcccagactacagggggagggtcctatttcatcccacctgggaggggatgttccctgccccatctggcccctctgcagggaaccacaagggtgttgctggtggccaggctctgtcaggtgtgaatgctgggcagtgccccgctggtccaggcaacagggctctgggaatgaggacctcttcctccaggtagcctgggtgggagagcatgtgggcacctgggcaggaccctgggtggggtagggtagggtcccatggggttgtggagggcaagtggggcccggggcctccttacccttgtggagaagagcagtgcagggtcctctctggacctggcccacggtcagcacctctgtgaccacctctgccagacagcgggtcagctggggggcaggggtgccgggtcagaggggaggttgagggcaggggagatggggaggagagcagctggtttgagggcaatgaggatcatggggcaggctgtgcagggagggcagggccccagctaggtgaggcagggcaaggcctccacactcctcacctcctccttggagggtctcggtgccaagggagcagcggtggctgtggagaaaggagatggcactgggctttgccgccctggctgctgtccccggtaccgaccccagctccatgggcgtcccggtccccacacatcccctccccatcccacccggcgggtgtactgtcccccgctggaggctcggcccctgaagcctctccactgggtgcactgcctgccccctcccactggagtccccgctccccggcccctggcaggtcccgcactcggcaggtcccgcactcacccgcccccagcaggagcagccgcagcagcagcagctcagaggctggccctcggggcggcatggtgggcgtccaacgggtccaaggcgctgtgcgggccagggttgcagcgccttataacccacgcggggaccctgcaggggaggaaatgatgtcacccccgccccctccccgcccgcggcggggcgacatctgcggggcggctgcctgcctgagaccctcaattattcatgaggcctccgccctgcacgcgctcccctcgaggcttcaggccaggagctcagcgcagatggtggaggcctcccttttttcgtttttttgagacacggtctggctctgtcacccaggctggagtgcagtggcgccatcacagctcactgcaggctcctgaacacacttgatcctcccacctcagcctcccgagtagctgggaccacaggcgtgtaccaccatatctggctaataatgtttattttttgtagaggcagggtctcactttgttggccaggttggtctcagactcctgggctcaagtgatcctctcgtctgggcctcccaaagtgctgggattacaggcctgaggtgccacacctggcctggggggatctcttcccagagcagcagggtctggtacactcgccctccacgctggcaggtggaccggggtgggaacccagaagcagccactcacagatggtccccaggcaactccttcccttcctgggcctgttttctcacagggtcttgttacaggctggagtgcagtgcctcaaactctcacacaagggatcctcctgcctcagcctccagatcagttgggactgcaggcttgcattatcatgccacagtaatttttttcattttttgtagagaggggttcttgctatgttgcctagactggtctgaaactcctgacctcaaatgatccgcccacttgggcctcctgaagtgctgggactacaggcgtgggtgagccactatgcttggctgagagtgggtctcataaacccgcttcctcagaggctgcagttggcttctggcctaagccccagctccaccacgtgccagctgtgcagcccaggataaccgcttaacttctctaagacctgtttcctcactgtaaatagggttggtgacaacctactctacagttggacagtgaggattaaatagttgtgtgtacagtgtttagggaagtgcctggtactgggaacggcacacgtccaagcatcttcagtgcagtaatttttgttgagcatctactacatgccaggtcctcttttagacctgaggctacagccctgagccaatgggtggatacctctgccctcctggagctggtatttgacacacatcaatacatattaaggaaagaaggcagaaatgcatcaaaaatatagtatctcaggctgggcgtggtggctcatgcctgtaatcccagcactttgggaggccaaggcaggtgcattacctgaggtcaggagttcaagaccagcctggtcaacatggcgaaaccctgcctctactaaaaatacaaaaaattagccggacatggtggcacctccctgtaatcccagctatgcgggaggctgaggcaaaagaatctctcagaggttgcagtgagccgagatcacaccactgcactccagcctgggacagtgagactccatctcaaaaaaaaaaaaaaaaaaaaaaaaaagtatctcagatgtaggtactgagtgctgggggggttttactgtggtcacggaagacttcttggaagaggtgacatttgagctaaggcctgagtgacaagatggaggccagcacacaccatctaggggagagacagccagagagggagactcaccaatgtaagtgcacgagtcaggaaggagtttggagagtttcaatgtcaaggcgggtcgggtggaccaaacaagacagaaagatgggctgaagaggaaggtggagcagctcaggtggggtcttaggggcctcgatgaccactttacccttttactctgagacgaagccacaggagacctctgagcaggggtgggacacccagctgaggtgctcacaggtccctctggctgtgtggcgaggatggagaacagggagccagtgaagaggcttccagggttaaccaaaggggagggatcggggagcagggcccaggtggggtcagggaggagagaacagtaggcagagtctggaaatcttttttgagacagagtctcgctctgtcacccaggctggagtgtagtagtgtgatcccagctcactgcaacctctgcctcccgggttcaagaattctgcctcagcctcccaagcagctgggattacaggtgcccgccaccacacccagctctttttttttttagatggagtctcgcactgtagcccatgctggagtgcagtggcgcgatctccactcaccacaacctccgcctcccaggttcaagtgattctcctgcctcagcctcccgagtagctgggattacaagcgtgcgccaccacgcccagctaatttttgtatttttagtagagatggggtttcaccatgttggccaggctggtcttgaactgacctcaggtgatccgcctgccttagcctcccaaagtgctgggattacaggcgtgagccactgtacctggccagattctggaaatattctgaaggcggtgttgccagggttgctaatgaagtggagtggatatgagataaaagtcgaggctaacccgaagggctgtggcctgggcagccgggagaatgtgctgggatgggcatgcctgaggaggagcaggtgcaggccaagtgatcagaggaccaggtagcttccctgagtttgggatgcccactgggcccctacctggagctgcagaagggacagctgcatggggagctggggactgaggggtgaggctggggctggggtcagctcgaaggaaccctcagagggtgactctgttctggcttgtcccagaggaaggggagagaattcagcatcctctcagcaaccctggtggccccaggccagcctccatgtgcactggggggtggctaggcacttccagccatggtctttgcagccacagaccctttgaggatagtgcctccaagcggctgctcagcagctcctagagagccaggcatctcccttgttcacagatccacagaggcctttgtcctgaccatttattggggactttttgctcagcactgtaggaggaaagaaggaaggagggatggaagcctcttcctctgcttctcctgtccctagaaccgtaaagcccagacgtcctgcttcccactgggaccctcaatgataacagggtcagtgactgactctgaggcagcaaggacagaggagaggtggaccccgtggtccaggggcccgggcgtggagctgacaggaagaacacagatgtcaggacgggctcagcaacacaggtcccaggtgtccggggtctcctgaactccaggaagcagtgacacccccgagggctgctgtgggtgggttcttagcttacagcaggctggccaggcagcccaggcttccggggctggttggggccgatgtactggagaggcacgtgggtaggggctgtgatccgatcagtgccgaggtaggactggagggcagggggcacgagcactgagccgtcctggggacagagcagacctcaggacactgcagatgccccagccctccccggcgctgagctgcctctctgggtgggcccctcagcccctcaccttctgctggttactctccaggagcgcgatgagaaggcgggggacagcacaggcggtggcgttcacctgtgagacagccatgctcggaactggcgcccaccccaagctgagcccggggaggagccaaggtgggtgggtctagggcggcagaggctgcgggcgagggcacgcgggcaggaggctgtgcgggcctcaccgtgtgggcaaactgcagctccccagcctcggtctggaacatgatgtggaggcggcggctctggaagtctgtgcagttggaagcactggtgacctggggtggaggagcggcaggctgagcggatcagggatggggggcaggcctgtcctcctgcccaccccgtccccagcggcacagggctcacctctccaaagcggcctcggcctggcatccaggcctcaatgtcaaacttgcggtaggcggggaggcccagttcttgggtgggcatatccaggaccctgcggtcaaggacgaaggtgtggggaaggtcagcgggtgagaggaggagcaagaggaacaaatggaaacgatggaagagaaggcagccaaaaagcaggaaaaagcccaggagtttgagaccagcctgggcaacataaggagacctcatctactccaaaaaaacaaacaaaaaaaaggagacgatagtgccaaaggagagagttgtgaggccaggggtggttatggagaaggtggtacatggagggggaagcacaaaagaggttgatgggaggggaaaaaggcacgtggcagggtccaccggctcttcacagtggccattcacacatttgcaccttctaggcaccctcggttttttttttttttttgagacggagtctggctctgttgcccaggctggagagcagtggcgcgatctcggctcactgcaacctccaccttcagggttcaagtgattctcctgtctcagcctcctgagtagatgggattacaggtgtgtgccaccatgcccggctgatttttatatttttagtatagatggggtttcaccatgttggccaggctggtcttgaactcctgacctcaggtgatccgcctgtcccggcctcccaaagtgctgggattgtaggtgtgagccaccgtgcctggcctttattttttttttttagagacagggtctcactctgttgccccaggctagagtgcagtggcatgatcacagctcattgtagcctccacctcctgggttcaagcaattctcctgcctcagtctcccaagtagctgggaccacaggtgtgtgccaccatacccggctaattttaaaaaacgtaaagacgagctctcgctgtgttgcccaggctggtcttgaactcctggcctcaagcaatcctcctgccatggcctcccaaagtgctggaattacaggcgtgagccaccacacccggcttacgctcccagttttttacaatgggtcacccagaaaagaagtccacatttctcagcctctcttgaaagctgcgtgtgactgacagggtgagaggaagtggggttcccaacctctggctcccccttttcccacccccactctccactgggaggtgaaaaagtatcttgggttgcacagatgaggcagtggcccagagagagggggagcagcaggaggaaaggggcccgggtctccactctggcacaccgtgcactgttcgtgcttctgttacagtcctgtgagggacgaccggcacacggcagacagattgggatcctgtatatgctcctgtaatccttgtacaggaaaatgggggcaacgagggggctggagaggtggttccagagcgaagagcagctggccagccccttgtccctcccctaccccacccctgccatccctggatccctggcccctctccacaccggaagtgcaagcccagctctgtcaagatctccatctgaagggacaggaactcctccagcagctgtgagctctgctccagcccagggcctgtcaccccaaacatctccacctgggacagagggcacaggagtcaggaggctctgagctcttggggtggccccccaccccagccccgtttagtcccagcgacaccagccttggtgaagtggtgtactcgatacagcccccggggttcctgtcccgtgtttgtctctgcccggtagcaggtgctggagcaaaccatcctggcagagagcagggaaagtcgggtcaaggagggaagactgattgtcacaggtggggtcaaggtctaaggaaaccaggtgtcacctgactggcaggtccctgaaggccacggtgtggtccatgaagtagcctgggaggagagaccacagggtgagccagggctgccagtgcccagaggaagcctttggaagattaagaggcactccctctggtggatgcaaccccaggtcaaggcccggggctggattatcactgtactgctgtacagtaaacaacctacacagccgtacatgttggccctggggctgctgagctgctcggggcaggtgatcccccccagtgctccctggacgctcccagttgtccttccacatcactcctgctcctccccaccacccacacaggtcctcacctgcaagccccacctccgctgttccagccaggttgagatctttgaagcgggcagggtcgatgttgtaaatttgggatgggttggcatttggtgtcatcccacagccttcctgggggaggaggccaggccacagggatcaggggacaggtaaccctggcctctcgttttacagtcccaaccccagctcctcccctgaaaacatctggagctgccctggcctccctggtatggcctggccccctcaacccagccccagggcggtctcctcaggtttccctgcctcgggcacccacggcagggcctgacacccaggtgggcgagggaagcggagaggcctcactcacaaacactgctccgcggagaaggtctggcaccgtcatgggggtgaagccctgttcaggggagaggatgagtgagcagagctgggacccctaccagaccccaagctcagccctgaagaaggggtgctgcagagccccttcctcctcagacgaaactgaggcaggggctggcgcagtggctcacccatgtaatcccagcactttgggaggctgaggtgggcggatcacttgaggccaggagtttgagaccagcctggccaacatggcaaaaccccctctccactaaaaaggcaaaaattagccggcatggagatcgtgctactgcactccagtctgggtgacagagcgaactctgtcaaaaagaaaaaaaaaaaaattagccagcatggtggcatgtgcctgtaatcccagctactcaggaggctgaggcaggagaattacttaaacccgggaggtggaggttgcagtgagccaagattgcaccactgtactccagcctgggtgacagagcgagactccgtctcaaaaaacaaaaaagtacagatttggccacaccctcccctgcttaaaagcctcccatggctccctagtaccctctgaaaatgtctgagttcctcaccgtgaccaatgctccatgcaaccagtccctgccatgtttcaatggatgctatgattcccaaatgctccctttataccgcaagcaggcagtgaggtgcaatgattacaagcacaggctctaggcccagctccagactggctgtgagaccttgggctataggtacctcccctctctgggcctcaagccctctctgtaaagtggggatgatgacagcacccacttcataaagttgtcgtaaggactaaatgtgtcaatgatacacatgaagctctgagagcagtgactagggcagagcagagatcactcccatccccgttgggccctctgagctcagcttcgatgccaccccctccaggcagccctcctatcttggcccatacccggcggagaagcttgttgaatgtgaagttgaccaggccgtgctgcaggagggctccagccccgcgcaggtaataggaccggtggccagacacgtgggacaggcgcctgggagacagacagacaggcgggtgcacatgggccaggctggcagggaatgtggggatgaaaacacccgggggaagaggcccggctgctgggtggggctggggcatcaaagattcatggcatttccacatctcacgctgaggccaatgaggcaggagccagctgtcggggtgcaggcagctgggagaggggcgtggggagccaggggaggggctcacttctgacggatgatgtcgagtttctcgccaatttccaggtggccccgaggttggaaggagaaaactggatgtgggtgaaaagcaccggtgtaaggcagcggggagagagggatggggcccagatagaagcttccagagacagcagagaggagggacggtgagagaaaataaaggaggggcaggaggagagaagggagaagaagacacggaaagggagggaaagggaagaaaagacagacaggaagggagggagataaaaacagagacagggagaggaaatgagaggaggcagagagggaaataagagggcgcggggtggggaaggcagagttagaaacagaggagagaggccagaggagaaggaaacaccacgaggaagggaggaggagaatcagagaggaggcacagagttggggagaaaaagccccggagacagggaccaaagcaggggggtcagagagagagacagagacacacacacactcacacacatacatacacacacagagatacacacagaggtacgaagacacacacacatatacagacacacagagacagacacatacacagacacgcagagacagacacacagatacacggatacagacacacaaagacagacacgcacacacagatacacacaaagacacagatacacagacacagatacagacatacacacagagatacacggagatatgcagatacacacacagacacacagagacagacacatacacacagacacagagaaagacacacagatacatacacacagatacatagacacacacagacacacacacacacaaacacagatatacacacacagagatagacacacacatagacacacacacacagacacagacacagatacagacacacacaaacacagacacacacacacagatacagacacacacagatacacagatacagacacacacagatacacagatacagacacacacatacagatacagacacacagatacagacacacatgacacacagtcacacaacacatacatacacgacacacactcacacacatacgatacaatcacacaacacagggtgagactgcccaatggtgaagggggagagaatgaaaacccaaggaccgcctctcagagacagctcgagctcggccaaggcaggaagctggagccacctcctgtaccgccaggagttctccaggctccagacatgttcccagaccccaggggcccccaccccgagaccccagaacccccacaccgcagggcttgtcagctcccaggcctggggtgtggcccacctggcttgtctccgaccatgtggagcactcgagcctggctctcatccccgacgggctgcagggagacagcaggagtcacggaaaggtggcactaggtgggcccctggcctccctgccacccagcacggtgctcaccacgtctgggtgggtctggttgggcagcttcagcgcctgcaggtagaactgctcctcaagctgggcctccctggggtacaggtgaacaagctccttccggatctcccggccacgtgcccgcagaccctggtacttggggtcctgggggcagcacaggtgggctcagcccgggagagggtcaggactccctcatccagtgtgaccttgatcctgaccggcagagcccctgtggtggacattcatgcctcttctccaggcccaggatcctgaacgtcttcgcagaacttcccttaccaccacatggcaggtttgtggggaaaagaatcaggcctggccaactagaacgttctattgccttggccacaatgactggctcagagacaggcacctgatgtcagctgaactcatgagaatcagccccaggactttaactggaactatcaggaaagcgtgcttgactttgcctcctacttacacaaggagagaaagctggcctgggaatgggaggaacgtaggaccaaatatggagccagcacctggatccagccgcacctgaagccagttttagtttcatgcatcaatagagcctattttttttttccccttaaacctgtttgagttgttttctgttacaatagtagaatcgtgactggcagggtatcctccctgcccacccccaaccctggataggacatcaactcttcacagtacctgctgcacttcaccactgtcctggtttgcctggtagaaaagagacagggtgggtgattaggttgacaaagtcgagggtggggaagagaaaaaatggtgaaaggtcaaacaaggccagaggatcttagtctcctgctctgtcagtgcctagctgggtccctctgcaactctgtgtttctgtttctctattgctaacgctacaaggaggcaagataattaacagtaatcacagccgcagatccgtataggaagtgatgcctccatgccaggctctatgtacagggctctcccatgccatgatttcttcaaaatccactttaggaggtaggcattcgtgtaaaccctgtgatatggtttggctgtgtctccacccaaataatatctcaaattgtaattccacctgttgaggaagggacctggtgggaggtgatcgggtcctgggggcggtttcccccatgctgttatcctgatagtgagttctcacgagatctgatggtttaaaagcatttggcagttaccccctgtggctgtctccagccaccatgtggaagggaaagtgccttgcttccccttccgccatgattttaagtttcctgaggcctcccagccatatggaactgtgagtcaattaaacctcttttctttataaattacccagtctcaggtattcttttttttttttttgagacggagtcttgctctgtcgcccaggctggagtgcaatggcgcgatcttggctcactgcaagctccacctcctgggttcacgccattctcctgcctcagcctcctgagtagctgggactacaggtgcccgccaccacgatcggctaattttttttgtatttttcgtagagacaaggtttcaccatgttagccaggatggtctcgatctcctgactttgtgatccacctgccttggtctcccaaagtgctgggattacaggcgtgagccaccgcgcccagcctgatctcaggttttcttttttttttttttttttttgagacggagtctcgctctgtcgcccaggctggagtgcagtggggggatctcggctcactgcaagctccgcctcccgggttcacgccattctcctgcctcagcctccctagtagctgggactacaggcgcccgccactacgcccggctaatttttttgtatttttagtagagacggggtttcaccgttttagccgggatggtctcgatctcctgacctcgtgatccgcccacctcggcctcccaaagtgctgggattacaggcgtgagccaccgcgcccggcctcaggttttctttatagcagtgtgaaaatggggccaggcgtggtggttcacaaatgtaatctcagcactttgggaggctgaggtgggcagatcacctgaggccagcagttggagagcagcctggccaacatggagaaacctcatctctaaaaccttgtactaaaaatacaaaaatcaggccgggcttggtggcttacgcctgtaatcccagcactttggaaggctgaggcgggcggatcacgaggtcaggagatcgagaccatcctggctaacatggtctctactaaaaatacagaaaaaaaattagctgggcgcggtggcgggcgcctgtagtcccagctactcgggaggctgaggcaggagaatggcgtgaacccgggaggcaaagcttacagtgagccgagatagtgccactgcagtctggcctaggtggaagagcgagactcagtctcaaaaaaaaattagctgggtgcagtggcacgtgcctgtaatcccagcgactcaggaggctgaggcacgagaatcccttgaacctgggaggtggaggttgcagtgagccgagatcgtgccactgtactctggtctgggtgacacagtgagactctgtctcaaaaaaaaaaaagaagaaaatggactaatataccctgtctgtagattcgaaaatggaagctcagagaggtaaagtctatcagtgtgcatttgagggcctgcaaccaaggccccttgacattctgaaccttccatgatcctaagcagctgagggaatcgaacagcctgggtctgaatgttgggcacctacatgctgtgagcccttgggaaaatctctgccccctctgagcctcagtatccccatctgtgaagtgggatgataacaggacctccctgggcagggctgttgtgcagcttccctgagatgagttagcactcaaagaacattaaatgatccattgtgttgctttcattggttgtccatgatgtagacagcccgaggctggccactcagtaggtgctgggagatgtgattcttggtggcagaggcctccaaacagagtggtaaaaaccaactgcctaggtgcgaaccttgcctctcccacttcctggctgtgagacttacgtactttttctggttgttttttctcggagacagggtctcactctgtcgcccaggctgcagtgtgatggtgcgatcatagctaactgcagcctcaaactcttggactcaagcgatcttcctgcctcagccccagagtagctgggactacaagtgcgtacccccatacccggccatttaggcccgttttaatctcttagggcctcactttttcccagctgtaaaattgggtttgtattgttcctgtgtgacaaatggctgtgaggattaagagtatggaaaacacctggtatggtgtgtagcgacttctacataaaggtctgctgttgtttttatgattgtttttaagccgtctgtggcagacactgttggttgtataacccaagatccctccttccaggccaggcgcagtggctcacacctgtaagcccagcactttgggaggccaaggcgggtggatcacctgaggtgatgagtttgagaccagcctggccaacatggtgaaaccctatctctactaaaaatacaaaattagccgggcgtggtggcgcatgtctgtaatcccagctactggggaggctgaggcagaagaatcacttgaacccagggggcagagggtgcagtgagcccagatcatgccactgcactccagcctgggtaacagagtgagactcggtctcaaaaaaataaaaacaaaataaagatcccttcttcctccttccccacagaactctgacgcagttcacccttccctggtagcctgtagttcaggggaagtgggcccaggtggaggatggcctctgatcagcctatgccggctgccggaactccattcctccggctgacaactggagtgtggtgggggtctgggcccaggggacacgaggggactttgctggatgcttcaggaaaggtgtacttgctcctgaaaaaggaactcaagccagagaagtctctgtctccttcccctggcacagtcatgtgaggagatgctggactacagcagccatctggaaaccctgatgggaaactgaggaaagatcagtgcagtgaagttgccggtacagagagaaggaaaggacctgggctggggatgctggaagaaccgctaattaatcagccctagggatgccagggtcctgcaacagctcgctatgtgaggtaatgcatgtccacattgttcacgcttgcttatttatttatttagggagtctcgctctgtcgcccaggctggagtgcagtggcgccatctcagctcactgcaacttccgcctcctaggttcaagcgattctcctgcctcagcctcccaagtacctgggattacaggtgtccaccgccatgccgcctaacttttgtatttttagtagagatggggtttcaccatgttgcccaggctggtctcaaactcctgacctcagctgatccaccaacctaggcctcccgagtagctgggattataggcgtgagccaccgtgccagcctgttcaagttctttaaattcggtttcctgttacctgtgtctagagacaccctcgtggccactccccacctactcagggcaccatgctcaccagcagggcccgcactgcctcagtcacagctgccttctcttcctccaggctccggatctgctcctgcagctgcctcagctcctgccatgtcgagatctggggtggatataagagaaaaggagatgaagcagccatcacccctacccttctctctggagcccactggccacctggacctgcggcgcagtgaggcagagatccctacctagccctcagtggccatcctcccctcctcccttcagtactggaatgccctgaggttcagctggccacacagatgcccagaattcagacacactggccgagcatagtggctcataactataatcccagcactttgggaggccaaggtgggtggatcacttgagatcaggagttcaagaccagcctggtcaacatggtgaaaccccatctctactaaaaatacaaaaatcacccaggtgtgatggcaggcacctgtaatcccagctacccaggaggctgaggcacgagaatcgcttgaaaccaggaagcggaggttgcactgagctgagatcgtgccactgcacactccagcctgggcaacaagagtgaaactctgtctcaaacaaaaaaagtctctaaactagcactttaaaaaatcatggctgggtgtggcactttgggaggcctaggtgggaggactgcttgagtgagcccaggagttccagaccagcctgggcaacacaggaagacctgcctctaagaaattttttttttttttttttttctgagacagagtctcactctgtcacccaggctggagtgtagtggcatgatcttggctcattacaacctctgcctcccaggttcaggtgattctcctgccttagcttcctgagtagctgggaccacaggtacgtgccactgcacctggctaagttttgtattttttaatagaggcagggtttcaccatgttggccaggctggtctggaattcccggcctcacgcaatctgcctgccttggcctcccaaagtgctgggattgcaggtgtgagccacagcacccggtctctacaaaaaaactttaaaaaaattagctgggtgacagattgacaccttgtctcaaaaacaaaaaaaattgttacaatgtacataatatgggaggctgaggcaggtggatcatttgagcccaggagttcgagaccagcctgggcaacatggagaaaccctgtctctacaaaaattagctgggcatggtggcacatgcttgtaatcccagctacttgggaggctgaggttggaggattgcttgtgcttgagcctggaagtctcacggagcctgagaggctgccatgagccaagatcatgccactgcactccagcgtgggtgacagagtgagaccttgtctccaaaaaaaaaaaaaatttattatttttttgaggaactgccatacggttttccatggcagccgtaccactttatacacattcccaacagcaatgcacaacgattccgacgtttccacaacacaattcttgccaacacttgtccttttctgttttgtttttaataatagctacttgaggctgggtgtggtggctcacacctgtaatcccagcactttgggaggccgaggcaggtggatcacaaagttaggagttcgagaccagcctggccaagatggtgaaaccctgtctctactaaaaatacaaaaattaattgggggtggaggcgtgcgcctgtaatcccagctactcaggaggccaaggcaggagaattgcttgaacccgggaggtagagattgcagtgagccaagactgcaccactgcactctagcctgggcgacacagcaagactccatctcaaacaaacaaacaaacagctgctcaaatgcacgtctaaactactactttgaaaatgaagagaatagccaggcgcagtggctcatgcctgtaatcccagcactttgggaggccgtggccagtggatcatttgaagttaggagttcgagaccagcctggccaacatggcaaaatccatctctactaaaaatacaaaaattagttgggtgtggtggtgcacaactataaccctagctacttgggagactgaggcacgacgatcacttgaatcaaggaggcggaggttgcagtgaccggagattgtgcgactgcactcaggcctgggcgacagaggaagactcagtcttaaaaaacaaacgaacaaacaacaaaaacacacccctggcccccccccccgcaaaaaaaaaaaacaacaactagcactttacaaatgaaagagaatataattaaagaacaagaatgcatcacacgtggtaagagcaataattgttaatgaaaccggtttcaattttgggtgtgtgtactgggtcaggatgtgaaatgtatttcttactcttggccacaaagtttgaaaaagcctgctaaaggatgtgacgctctaaattatctacatggccatcaaatggaattttccatcctacctccaggcttttgtatattctggtcccctacttgggatactcttcttccctcttccctggtgatttctcaatccacagatctttgtttaatgccacctcctctgagaagtcctcccaggctgtcctccactttgccttcacagcatttaccacagattataatgagtatatctgtctctatgaatttgattactctaggtagtcaaatttaccagaaattgtaattagtatatatgtatagttgtatatgttaaatgtcttttagtggggcatggtggctcacatctgtactcctagcactttgggaggccaaggtgggtggatcacttgaggtcaagagttcgagaccagcctggccaacatggtgaaaccccgtctctactaaaaatacaaaaattatgcagatgtggtggcatgtgcctgtaatcccagctactcgggaggctgaggtgggagaatcacttcaacctgggaggcagaagtcgcagcgcactccagcctgggagacaagagcaaaactccatctcaaaaaaaaaatgtcttttactagactgtgaactcagatcatgagagggcacagcagggtacttaagattgtggagtctgggtgtggtggctcatgcctgtaatctcagcattttgggaggccagggtgggaggatcacttgggcgcaggagttcaagaccagcctgggcaacatagtatgtccctgtctcaacaaaaaatacaaaagtttagccgggcgtggtggtgtctgcctgtagtcccagctacacgggaggctgagtgggaggattatttgagctcaggaattcaaggttccagtgagctataattgtaccactgtactccatcctgccatcctgggcgacagaacaacaccctatctcaaaaaaaaaaaaaaaaaaagtggattctaggccagaaagcacaggttaaaattcccactctgccacttcccagttgcatgacctagcgcaagtgaattagcttctcgaagccttagtttcccctctgataaaatgggagaaataatggcacctacttcatagagttgctgtgaaaattaaacgaggttaaagtgaataaagcacttcaaacaggctgggaggggagtccaagagaggaatgggaagacgtggggaccccactatcgttagcacctcaacacagagatattgtgaacccggtcctaattcccttttataagtgctagcaattttattattattcaccgcatatttgcaacatctagaacaccggaatatagcagttgcaccttaagtatcagtttaatagaaccattcattaatggattcattcattcattcattaactctatttaactgcctgctatgtgtggcggaggtgcacaactctccctacctctctctctaaacgcaagagctccaccacaccccagccctgaccccgtccgattcacacttggctccccattttcctttgtggtcttagggaaaggctggcatgaggttgcagcacggagggcaatgtcacatagcaagttcctaaaggacaggaggtacccagcgagcagtatgaaacaagcgcataatgggtgtccaggacacagtaggcattcttggcacatagtagggcctcagcactcactggacaactggcacataagtgggtgccatgcacaagacgttggctaacttgggaaataactaaaattcctactacaggttcgccccctgccggagggcatcttgcaaacccaattcttccgtaaagcaaacgtctgcgccccccggccggcgcaggcgcactcacgatcgcgggcaggtccgccgagcgcagctcccccttgcggagctccagggcgtgtgcggcctcttctgggcatgcgcagaaccgctctatgtccagctgagggagtgcgctgtagccctcgcgcgcatactcgtacaggaggttccggtttcgtttctctgtagtgaaacttctccttggactatcgttggagatgcagcctccccggggccggaacccccgacgagtcagcaaaggccacaagcgccgcgccatggacgcagccatcttggaccgggaacaaggcggcacttcgtcccgcccactccgcgtttagaccaattgcaaggcagcgaacctgaccgtgacgagccaatcagatcctgaggaaagttgaccgcgatagagtccttcgtcgcccaatcgtcgtctgtgtcccgcctcttcagtgacgcgaggcagaaccagccaatccctgcacggatagcgcccggaagaggctagaagctggattcagcgtgtccgcgacctcacctttaggtcctgtgaggtcggtggaatcctggggtcctccaaatctaccaggccatctccccagtttcccagttcttcctgcgtgcgggcgagagtggttgggccctcgggaacccactcagagcgaggctaaatttacggagggactttctgttagcagcatgagggcctgtggttagacctatagaggtatttcctttgatttaagccagaaagtcctgagagcggatcggggagcatttgcggatcggtcactttttcctcctttctgagtctcttatcccctaccacagggacggcccaggtggcaggatgtcctggtctggccttctccatggcctcaacacgtccctaacttgtggtaagtgggggacttgggcttcagggacgaggctagagggggagggttattcgctcttggacttgtgtgcctccgtcggagccccgagggaaacgggggtggaaaaacacggtggggttttggcagagctagggctgctagagcaagaggtgggaagcagctgcatggagggctactgcgtgtcaagcggcgtttgggtcagttttattatttatttatttaagatctccctctgtcgcccaggctgaagtgcagcggtgtgatcacagctcactgcagtctcgacctcctgggctcaagtgatcctcccgcctcagcctcccaagtagctgggaccacaggcctgcagaaccacaaccagctaactttttgattctttgtagagagggaggtctccctgtgtcgcccagtctggccttaactcctgagctcaagtgaccctccacagcctccaaaagtgctaggattacatgcatgagccactgagcctactattattttaaacagcattaaaaataatgcttcctggccagccgtggtggctcacgcctgtaatcccagcactttgagaggccgaggtcaggagttcgagaccagcctgaccaacatggtgaaaccccgtctctacttaaaaatacgaagattagccgagcgtggtggtgggtgcctgtagtcccagctgctcaggaggctgagacaggagaattgcttgaacccaggaggcagaggttgcagtgggccaagattgaggtactgcactccagcctgggcgacagagtgagactttgtctcaaaaaaaaaaaagaaaaaaaaaaaaaaggtaatgcttccttgaagaataaagagttacttttgtctgtagataacattagatgtgaacaaatgcatctttgtaaagtgctttaaacaatgcctaaaacaccaaaattgagttgctactactctaagatctgttctctgggataataacccctttcggccctctccaggcccagctctggttccccggctctgggctacctgctccatggctaccctgaaccagatgcaccgcctggggccccccaagcggccgcctcggaagctgggccccacggaaggccggccgcagctgaagggtgtggtcctgtgcacgtttacccgcaagccgaagaagcccaactcagccaatcgcaagtgctgtcgagtgcggctcagcactggccgcgaggccgtctgcttcatccctggggagggccacaccctgcaggagcaccagattgtccttgtggagggcggccgcacccaggacctgccaggcgtcaagctcaccgttgtgcgtggcaagtacgactgtggccacgtgcagaagaagtgacggctgggggcacagtgggctgggcgcccctgcagaacatgaaccttccgctcctggctgccacagggtcctccgatgctggcctttgcgcctctagaggcagccactcatggattcaagtcctggctccgcctcttccatcaggaccactattaagccataggagtcctgggggtgcaaagggtgcccctctgtcaacacccttggctcctgtgtttagaggggtggcctgaaggaccttttctgctgggacaagacactgtactgccctctgctgggaaggggttttaataaacagaccctggcgcttgtgatgtaaatccccttgtggagtatttgccctctgtgtggctgtggcagtggacatctctgagcttcagtttcctccagaaaatagctccattggtggtatctcctttgtttggtttggtgaagattaaattcgatgctctatgtgcataacacgcacggagggctcttttttttttttttagacaaagtctcactctgttgcccaggctggagtgcagtggcctgatctcagctcactgcaacctctgccccccgggttcatatgattctcctgcctcagcctcccgagtagctgggattgtaggcacacaccaccaggcctggctaatttttgtatttttagtagagacagcgtttcaccatgttggccaggctggtctcaaactcctgagctcgggtgatctgcccaccttggcctcccaaagtgctgggattacaggcgtgagccaccacgcctggcagagggctactgtattttaagcttaggagtcaggtaggtggcacagaggcccaggtcttcttcctgcaggccatgggttctgggcacataaactctgccctcaagcatggacagctggaaaatggcagtaattgtaatgttgatgtggaaggggtgtggaaaggattcaatggggtgtgctgctccacacccgggagctgttcttttattttatacgtgtgtgtgtgtgtgtgtgtgtgtgtgtgtgtttgtgtgtgtttgtgtagagagagagacagagtctcactgtgttgtccaggctggagtgcggttctatgatcaaagcttacttcagccttgacctcctgagctcaatagatcctcccgcctcagcctcctgagtagtcaggaccacaggtgtgtgccaccacacctggctaacttttccatttttttagagtgggaatctggctttgttgtccaggctggtctcgaactcttggcctcaagagatccttccaccttggcctcctaaaatgctggattataggtgtgagccactattatattatataataatataaaattattactgggttcacctgagctcaaattctgctccccgtcataattgctatgagacctggctatgttggttccccctatgggcctcggtttcctcccttggaaaatggcactgatgataatgctgactgcacctgatcatgtttttggccatgtaagatttaagaagtggggccaggtgcagtggctcatgcctgtaatctcaacactttgggaggccgaggtgggccgaccacttgaggtcaggagtttgagaccagcctggccaacatggtgaaaccctgtctctactaaaaatacaaaaattacccgggcatggtggcatgtgcctataatctcagctactcaggaggctgaggcaggagacttgcttgaacctgggaggtggaggttgcagtgagctgagatcagcaccactgcactgcagcctgggtgacagagtgagactctgtctcaaaaaaagaaaaaagaaaaaacaatgttggaactgtgtttatatcattgggctctggagcccagcactgctccaagccctgcctcccctacttactggctgggtgaccttgggcaggttgtttacactctgagcctggaccaaatggcgctgataagggtgcatgcttgagagctgtttggagcatcatagctgtctccgagttcctcttgacgctcaacacacagcctcctgagggtctcctgattgtaaacatgaggccacaaggtcttttaggatcagagctggtggcagataagtgcactgattacagataaaaattgcccatcccctcatatttggcaccagttttattgagctagtttgttggccatgcctagctgagaaatagagaagtggagggagatggggggatgggagagcttttcctcatggcacactctgctccaggagtctgtatacaggagtgtggagaaaaggaagtgttaccttgcaggaagttgcccccaaagcaagggcaggaggtgggggtgggggacttggcctctgatggaattctggaattctgatgagagaggtgctagcctgacctgaacaggagatgctgacaggcagtgctgggcatgttgcacagagatggctggttacacagccccgtggcaggatcccagagtgccgagaccagctgggtcgtggagaccctaacccagtggcgctagaggaattaaagacacacacccagaaatacagggtgtggagtgggaaatcaggggtctcacagccttcagagctgagagcctcgaacagagatttacacacatatttattgacagcaagccagtgataagcattatttctatagattatagattaactaaaagcatttcttatgggaaataaagggatgtgccaaaataaacggatgggctctggctagttatctgcagcaggaacatgtccttaaggcacagatcgctcatgctattgtttgtggtacaggaacccctttaagccgttttccatcctgggtgagccaggtgttccttgccctcattccagtaaacccacgaccttcagggtgggggtcatggccatcatgaacatgtcacagtgctgcagagattttgtttatggccagttttggggccagtttatggccagattcaggggcctgttcccaacatgtccccttttttgttttgcaaagtgataaaagcaaaggcagctttgtcacggtgagctacttctcacaggagtcaggatccgcatctgcacactatacaaagacaaacaacacagagtaaaagcacaatcatcattgaaatcacagagcctccaagtgtttttatccatttgaatgggttactagctgctaatctgtctgcagctccttcaagcactccagttcctggcattaagttcacgtgtgcctgggatactttaaatatttgttctttcaattttgcaatatccaaatacaagtttgtagagtggccttctagatgcttttttattctttcccaaattttgattttattaagagctattaacagtttccacaaatgcttatgtttagctcctagagcaggccatatcatttgaggctgaggtgccactatactgccatggttccagataataggaactcttgctgtatttcttaccatttctatcatctgaccattttgttcagatgagctgatcacagtgtggccatggcatgcagactgagaggtgcagttcaagctaaacatccccataggtgaccaattaataatgattccataggaattgttgtgcagcacctctgcctgttctgcaaagcaatcttcctaaacaagtacgttcatttttgctaactgggtccaatcctgtttacaaatatgtttttgagggcagtatgcctcaattataggagcagatttattatgagatcagaaagcttgtataactgtgtcatagagtgattacatccaggcattattgccagccaagattgataaatatgcccaataagtataattgtcctctgtgtcagcccttattgaaggaatactcatggcagtggtgatcatcgctatcatagctaccattaaattactcattgcgactggttgtcccactttcctcaggttttcttccaccatctgtgacagcttcttgatctgtctccaggtgggtggctgtgtttgacaggtgttgctcgtgacagttggggtcttcctcagcgtcagtctcgacatggctgcaaccgggggtggggggggtcctcagtttcctcccggaatctcttcctcagcatctggctcatgataaggtttcaggtgtcttgatggtatccaaatcggctgttgagtcagtcctggagaaacacaagcataacctctaccccaagttattattttacctatttcctaactttttgttattggatctctccaccaaactagttgttctgcttctgtctttgcagctggtttctgtagatgctgttcagctactgataggatctggcctttaggcaggctcaaaaaatttaaagttaacaatgctagattcagttgcatatggggtgtcccgtagtccttgttttccccccttttttttgcttttgcaactgctgtttcagggagagattcattctttccactatggcttgtccttgagaattatatgggataccagtaatgtgtttaatattccgtatagagaaaaatgtagctagagctcggctagtgtagcctggggctttatctgttttaatagaagctggaatgcccatcactgcaaaacactgcaaaaggtgacgcctggaagaggtgtatgagccctaatgtgagtgatgtaaaaagggtgcattctactcctaactgctgtttgcagttgggtaaataaaatcatcagttgttcatctgcaggaaattgtaactgagcattttcagttaattgtgtggaatgaatcacgtatgaagagtcagaaatcacattaataggcatatgaaaagcagtcactacctcaattacagctacaggctccactttttgagctgaagtatagggcatctgaaaaactttactttttgagccagaataagaagctttaccattactagacccatctgtaaaaacattttcagcaccttcaattggtttaaatttagttattttagggagaatccaattagttaatttcaaaaattaaaacagttttgtttaggaaaatggttatcgagaatacccacaaagtcagcttaattggtttgccaagtaagactatttataaaagcttgctgtatttgtgcctttgtgagagggataataatttttccaggatcatatccatgtaatttaacaatccgagttctcccatttcctatcatagtagcaatttgatccaaataaggagttagagtccgtgaattagtatgtggaagaaaaagccactctacaagatctcactcttgaacaataacaccagtaggtgaatgctgagttggaaaaattagcaaatctagagtcttctctggatctaatctatttatttgagctttatggacttgcttttcgattagccgcagctctgcctcagcttctcttgttaattaccgagggcttgtgagaccaggatctcctctaaggatagaaaatagattactcatggcataggtaggaatgcctagagcaggtcgtatccaattaatgtcccctagtaatttttgaaagtcctttaatgttttcaattgattcctatgtatggttgctttctgtggcacaatggtagtgtcatttactaaggtccccaagtaggagtaaggagtagtagtctgaattttgtcaggagctataattaaaccagcgcaagaaatcgaattttgtaagtgatcataacattggagtaatacttctcgagtgggggcagcacaaagtatatcatccatataatgaataatgtaacactgtgaaaacttttaacgagtaggttcaattgcttgccctacataagtctggcaaattgttgggctgtttaacatgccttgtggcaatactttccagtgaaaacgcttagcaggctgcaggttgtttactgcaggaattgtaaatgcaaactgttcacagtcttgctcagctaaggggatagtaaagaaacagtcttttaaatctatgactattaaaggccaattttttggaatcatagcaggagaaggcaatcctggctgtaatgtacccatgggttgtataactgaattaatggctcttaagtcagttaacattctccgtttatctgattcttttcttaattacgaaaactggagaattccaaggggaaaatgttggagctatgtgtccgttttctaattattcagtaactaattcctctaaagccttcagtttctctttacttagcggccattgttctatccaaattggcttatctgttaaccattttaaaggtataggttctggaggcttaacaatggccgccatcaaaaataatatcctaaaccttggcggaaacttgtatttctgcttgaagcggttccttcaaaccttgtaaattttttcctagtcccatactagggacataccccatttcatgcatcatatgttgactttgagggctatataattgttctggaattagaacttgtgctccgcattgttgtaataaatatcttccccataaatttataggtacagaagttttggttgaatagtcccaggttgtccatcaggcccttcacaatgcaaaatataactactttgatatacttcaggggctttaccaactccaactatgttaaactgagcaggttgaattggccatgtggacggccattgctatagagaaatgaaatgtccgctcctgtatctaccaaacctttatatttctttccctgaatagttatttcacaggtaggacgtttatcagtaatttgattcacccaataagctgttttgccttgtttatttgtgcttccaaatcctcctgttcgtttaatttcactttttcccattcccacatatggcacattcaggagctgtgctatgcgctctcctggctctgctttccagggaacagaagtagaaaaaacaatttgaatttctccattgtaatctgaatcagtgactcctgtttgtacttgtaccccctttaaatttaaactacacctccctagaagtaatcctattgtccccactggcaagggtccacagacccctgttggaactttttgcgggggttcctcaggcagaaggctcacagcttttgtgcagcataaatctactgtggcattactggctgtggcaggggacagacattgtacaggggtgaaggagtggcctgaggcggaaatgcccctggtttcgaacagggcccgggatgggcccctcatggcatttcccgaaatcgggttcccatctttatcaaacttagagtgacactgattagcccaatgttttcctttttttacattttggacatatatcaggctcagcagttttcttttttcccctgtctgccggcctgacttgctgatttttttctgcattcttttttagtgtgcccatgcttcccacagttgaaacaagctccaggaaatggagtatttcctttatccactttcagtcctgccattgcctgtgccaacaaagtagctttatgcagattacctctgataccatctcaggccttgatataatcaactaaatgtgctttccctctaataggtcacagagcagcctggcaattgagattagcattgtcaaaagctaataaccgcaacactatatcctgagcagccgaatctgcaatcacctttttaagatactcctgtaaccgagctataaaatctgtgtacggttcttttggtccctgttttacagcaccaaaggaagggtactgttctccacctgaagtgattttttcccaagctctgatgcacactcctctaagctgctctatggcatcatcctgcatgaccacctgtgcatctaaaccagcccagccgccgacccccaaaagttggtgtgcagttatatcaatttgaggttgggcctgggtgttgcgaggagcctgaatggaagcttcatctgcccaccaagttttaaattgtaagaactgagcaggagttagacaagctcaagtaagagcgtcccagtcaggaggaatcatccgactggaaacagcaacattctttaacagtcccgttacaaaaggagaacctggtccatattgattaatagcttgtttaaattctttgagtaatttaaaaggaaaaggctcaaatgtagctgtaatatttccctgttgatctgggggatgtattctaacagggaactgccaagcctctaaatcaccctctcttctagcttgctgaattcctgcctgaatggaactgagagcagtcgcttgaggcactgcccaaacagtcactggggcaactacttttcacccagtgtcctctggaaaagaaagatctggagggtcaggtcactctttttcttcacactaaggaggggatgcagaagggtagggatgaacctcttcctcctttgccactttagctttagctggcaaacaaacctgctctgttacctcttccattacttcattacactctccctgctcctcatcagtgtgaaaaggttccaaggtggaatgaaccagaacccacacctgtcccattgctaccctgatgcttccgagctccccttcttactcaccatggggattgcttaagagtactcgggtgtcctccagcttagttccacgttctccaaccgtcgctccagtgactcttcgacctgggttcgagcccccacgtatgggtgccacttgccgagaccagctcggttgtggagaccctaacccagcggtgctagaggaattaaagacacatacacagaaatatagggtgtggagtgggaaatcaggggtctcacggccttcagagctgagagccttgaacagagatttacccacatatttattgacagcaagccagtgataagcattatttctatagattatagattaactaaaaacatttcttacaggaaataaagggatgggctgaaataaagggatgggtctggctagttatctgcagcaggaacatgtcgttaaggcacagatcacttatgctatggtttgtggttcaggaacccctttaagcggttttccgccctgggtgggccaggtgttcctcgccctcgttccagtaaacccacaaccttcagggtgggggtcatggccatcacaaacatgtcacagtgctgcagatattttgtttatggccagttttggggccagtttatggccagatttgggggcctgttcccaacaccagagatttccccaaacagcagatgactttgttagtctcaaggacagactgcctcagcggacctctgctccctgcccacgatcattacccccaaaacatgccggcaagtctctgctccctgcgtcggcagagggatttataagccctctcttataaatcctggtttagcctttgttttgtgactgagtccaccgagatccttgcaggagaagaaaatttgcaggcaaatgaactaaatgtctcttcctgacactccccttctggggggctgaggaagctgtgaacagcctggtttgtcacacagcatgatggccaccacactgaagcagcagcaagcagattcatggaaggtgtgctgagaaccagccacctgggagccctactgtccctgggtatcctctggcttctggctgcaaagctggtctttttttttttttttttcattgatatagggtcttgctttctcacccaggctggagtggtggtgaaatcacggctcactgcagcctcaacctcctggtctcaggcaatcctcccacccaagcctcctgagtagctgggactacaggcggcaccaccatgcctggctaattttttaaaaattatttgtggagacggtttcactatgttgcccaggctggtcttgaactcccgagctccagtgatcctcccacctcggcctcctgaagtgctgggattccacaggtgtgagccactgcacctggctgcaaggctggtcttgactgacaacgtcaggcagtagtccagtcgctaggacagacggatcctgaccctcacactggagtgggtcacaagggcgccatagtgccccacccaggaactcacgtctctcccgtactgctcaaaagatacgtagcggatgcccttgccaaagttggtgaagacgtgggagacctgcagggggaaggggagtgagagggtgagggcctgcgggccccttctcttcctccacttcaacagataggcccaaaggactgaggaggtgccagtcctgcgctagtttgctggggacggagcagtgaataaaaccggaaaaggaccccgccctggtgtcagtgccattctagcagggggcccagacactggagataggtgggggtgaggggccaggggcattctgccaggaaggtggcaggaatgtgagtagagtgagttagcaaaggccccacagaggtgacacctgaaggaggagagggagccgggaggggctctggagggtgtcccaggcagcaggaacggcccgcgcaaaggccctgaggtgggagaatgcctggagctgagtgaggggagaggtaagagaggggtcagggaggtcatgggcagatcatggccttgtgggccacaggaggactttggctttttttttttttccaatttaaaaaagttgagataaaattttcgtaaaacaaactttttatttatttatttatttttgagatggagtctcactctgtcgcccaggctggagtacagtggcatgattttggctcaatgcaacctccacctcgcaggttcaagcgattctcctgtctcagcctcccgagtagctgggattacaggcgcgcaccaccatgcccggctaatttttgtatttttagtagagacgggggttttgccatgttggtcaggctggtcttgaactcctgacctcaggtgatccacccgccatggtcttccaaagtgctgggattacaggtgtgagccactgcgcccagccaaaatttaccattttattttatttatttattttgaggccaagactcgctccatcgcccaggctggagtgcagtggcatgatctcagctcactgcaacctccacctcccccggttcaataaattctcccgcctcagtctccccagaagctgggattacagacgcccatcaccgtgcctggctaatttgtgtatttttagtagagacagggtttcactgtgttggcaggctggtgttgaactcctgccctcaagtgatctgtccgccttgacctcccaaagtgctgagattacaggcatgagccaccacacccggcccaaaattcattttttaaagtgtacaattcagtggtttttagttgattcacgatattatgcagccatcaccactacctaattcccatcaccccaggaaaaaactctgcatccatgagctgtcatttccaagacctccctcccccagcccctggcagtcgccaatcttcttagtgtacatttcatatatgtggaatcatacagtatttgtcatttcatgtctggcctctttcagcatcatgttttcagtttatccacgttgcagtgtgaattcatgcttcatttcttttccgtggctgcataactttggcttttactgtgagatgtagccacaggagcattacaagcagtgagacttctgatctgactcattattattattattattattattatttttagttagcgtctcagtctgttgccctggctggagtgcagtgggaccaactgggctccaaccatcctcccacctcagcctcctgagtagctgagactgcaggtgcaagtcaccatgcccgtctaatttttaatttctttgtagagatggaggtctcgctatattgcccaggctggcctcaaactcctgccctcaagctgtcctcccatcttggcctcctaaagtggtgggattacaggtatgagccactgtgcccagccgaaacatttactttggtaactgaggtgtgaggatcaagacagcatagtcttggtgccagattgggcttgagtccagctctgcactggaccagtcacataacctccctgtctgtgcctctgtttcctcaactctagaatggagataggattttgcttcactgctgcatttccagcacatagagtggtgcccagcacacagtaggtgctcaatcagtgtttgttgaacattaaggggttttgctaatgaaatgaatcgatatgtaagcgtcttgacacagggcttgggatgtaagaagggctcgatacttcttagctgttatgattatagatatccaggagtgacagaagggaaaccgagcagacgagaggctgggcgtgtgtgcctttagcgggtcggggggagctggaagctagtctggacccacctgtcggcagcccctctcagtccactgaaggaccgggtcaggtgaggctgagaacttgaccacttccttttcatacacatccagaaggcggacccggagctggtagacgcagccgcagttctctcgagcgccccacctgccaggcagcagtcagcctctatgcccccgtcacccagccagctctctgggtttcggggcgggaggctgagggctggctccatcttgatgaaggtcctgcacatctggaccacatttggagacgtcctggcctgggaacctctaggggaggagccttggtggttctggggtggaaccagagcctggcggaggagcctgggtggtcctggggaggagccagagcctgggggaggagcctgggtggtcctggggtggagccagagcctgggggaggagcctgggtgaccctggggtggagccagagcctgggggagggtcctgggtggtcctgggggaggagtctgggtggtcctggagtggagccagagcctgggggaggggcctgggtggtcctgggggaggaatctgggtggtcctggggtggagccagagcctcggggaggggcctgggtggtcctgggggaggagtctgggtggtcctggggtggagccagagcaggggaggagcctgggtggtcctgggggaggagcctgggtggtcctggggtggaaccagagcctgggggaggggcctgggtggtcctgggggaggagcctgggtggtcctggggtggaaccagaacctggaggagaagcctgggtgaccctggggtggagccagagcctgggggaggagtctgggtggtcctggggtggagccagagcaggggaggagcctgggtggtcctgggggaggagcctgggtggtcctgcggttgattctggaggcttttgggtaggtagttgggggacgggaaaggatgctctggggaagaaccacaatgcagggcaggtgcctgatgacttcagggaagagccagagccccagggaagagaccagattttctatggaagagccacagcctgaaggaggagctggaatgctttggggcagaacctgggtgttttgggaagaaggcattcatcctaagcctgtaggctctgaagccagtcctgtcccaactatgctccctgagcctcagctcacagggcaccatgctcccaccccttcagagaccctgggcatccacaaggtggtcaggggaggtgtctcgtttcagaggggtatcaagccagtcagtggccccctgtggaccaccccagcctgctgggatgagggtgggcaggagtgcagagtgggggctctggcttctccaaagctctaccttccccggctctgcatcacttcccctctcagcctcatcacaaagggtgcacagtgacagccgctacccgtggggttgatggggcgggaaatgagcccctgttgcagagccgctgccaagcctgctgctgctctggggcagggtgccgctcctcactcaccagtcagccacacagatctcaatctgggcgctgtccagcagctcctgccacaccccttccatcaccaggtccacaagctgcctcttggagcaccatctgggaaggagagatggcagggggcagggcaaacagtcctggcattcaagtcacagtcagaagccacctcctccaagaagtctcccttgataaccctctctaaagcagccctcagggtttgctctagcagacctgaagatgcatgatgggctatacatctctccttggcctcttggagtccctttgccattctccaccctgctgcgggctccaggcagctgacctctatgaaagcctgaccctcatctttgtgggacaggacatgactacaaatgaaggccacatactagacatgtgagcggggagctctgtggcctcctaaagtgtgagggccccgggtctaaagctggacagccttgtctctgtcacccattgcttcctgttggatcagccaatgggatgctccggcaggggatggaagtgaaagaggtgactaaaatcagggtatttatcctcttaggtccttctcaagggactgccttgtcccccaaggaaaaagcaaatctccatggcactctctcctcattttccagtaactgtttcctcccctcacctctagcagtctaggggtggtaacgttcctttcctaactgttactagctcaggggctcctgcctacaactttgtaaacagtccttctcctcaaactagaatgtgccataataacataaattgtgcagtattggtggaaggatgggtaagttgagcaatggaatagaacaaagtgccaggaaccggctgagcgcggtggcttagacctgtaatcccagcactttgagagcccgaggcaggcggatcaccggaggtcgggagttagagacgagcctggtcaatatggtgaaacctcttctctacaaaaaatacaaaaattagccaggcatggtggcgcacctctgtagtcacagctattcgggaggctgaggcaggagaatcattggaacccagggaggcagaggctgcagtgagccaagattgcgccactgcactctagactgggcaacaaaatgagactctatctcaaaaaacaaaaacaaaaacaaaaaaaacagagtgccagggacagacgtaggtatacacagaaacttcataaactgtagaggtggcaccatcattccatggagaacagattctcattttttcttttcttttgagtcaaggtcttattctgttgccaggctggagtgcagtggcatgatcctaggctcactgcaacctcaaactcctgggctcaagagatcctcccacttcggcctcccaaagtgctgggattacagctatgagccaccgtgcccggccttcagtttcctgttataaagtgggggcaataatagtatctatgtcacagggttgttgccagaattatatgtaaagtgtctagtatagagtaactccttgtggaggcaaaagcgactccatcttgggtgctaatctgccatgttccctttttttttttttttgagacagagtctcattctgtcgcccaggctggagtgcagtggtgcaatctcggctcactgcaacatttgcctcctgggttcaagcgattctcctgcctcagcctccacgtccagctaatttttgtctttttagtagagacggggtttccccctgttggccaggctggtctcgcactcctgacctaaagtgatctgcccacctcgggctctcaaagtgctgggattacaggcgagagccaccgtgcccggcccaaaaccctgtctttagatcaaagctgtcttgctgttgtctcacaaactgcaggcgatgatgcacagagcattgctgcctgtggttgctaaccttcctgatctttccttgtatccctggcatatgaaacagtaccctcaacaagtatttgttgattgatggaatgaatcaatgaataaataaatgggggaaggagagggtgaaggtgacgatgaggacagtgtggggggtagggtccctttctttggggcctttgccccagggatcggggcctctcacttgggccactcactcgaaagaggtcacgaagcaggtctgcgaaggagccccaggcaccggtgttaggttcttttctatggcccagccgttcccgccatgctccacctcccagcctctgaagccctctgtgggaaaacaagagttgaacatatggttcacctgccagcctgcccagaagagaccccgcaaccagccagcttgtgctgtccaccagcctctccctcttgtgctccaatcctccctggtttctcctaccgactcctcctcccattattctgtattcctggtcctaccccacaactgtgactctcagcggtgcccatccactcagcttctcttcagccacccttacttgctctttctccttcagtcctgctcttcattgtgtgtgtgagagacagggtctcactctgtcgcccaggctggagtgcagtggctccatcatagctcactgcagcctcaaactcctgggctcaagcgatcctcccacatcagcctccagagtagctaggaccacaggtgcatgccaccacgcctggctaatttaattttttaatttttttttgagatggagtttcaatcttgctgcccaggctggagtgcaatggcatgatctcagcccactgtaacctccgcctcccaggttcaagcaattttcctgcctcagcctcccaagtagctgggattacaggcgtgcaccaccacacctggctaattttgtattttagtagagatggggtttcaccatgttggtcaggctggtcttgaactcctgacctcaagtgatctgccccctcgggcctcccaaagtgctgggattacaggcgtgagccactgcgcctggactaatttttaaattttttagagacagagtctcactttgttgttcaggctggtctcaaactcctggcctcaagcgatcctcccaccatagactcccaaaatgctgggattacaggcgtgagctactgcaccccaccatttttttttttttttgagacaaggtctctgtcacgcaggctgtagtgcaatggcacgatcatagctcactgcagccttgaactccttgggcttaagcgatcctcctgccttggcctcccaaagcgttgccattcccaccgcgcctggcccctgtcctgttctgcatcccctctgcataccaaactacttgctttctcccccggcccagccagggtcttcctgccttgccccgcccactcgttcggattcccggcttcaccttctccagccccgcccaccgggcctaccgcccaggcactgcgtccctcagccccgccccctggctcctccagcggtctcgcccattggctacatctctcagactctgtcccggccccgcccccgcctcgctcgcgcggcccccctcagcctcctgggccccgcccccgtcacccacgctctccgcaggagttgaagatgagattgcggccgaagggcgcgcgcagacagtagcgcgccagggcgcacagcgggaactcctccttgtcttcgttgctgggcaggcagcgttgagccactgcgtagagtgcgcggccctcggcgctgcggtcgcgggccagctgcagcagccacacagtgggcccgtccactatgtcgcgccaggcgcggcacactgggcggcatcgcgtgaccaaggagcgtggcggcacgtggctcagcacctgcaccagcagctccgggggcagcgcgtccagggccagggatgggtccgccggcagccgtcgccgcgatagccgggcgcccatctccagtagccagagtcctgcaggtcgagaggggtcggtaggcgggtcagcgcagccaggccaccccctccctaccttgtcccccagggcgcaaggcccctgctgctcgagagaccccattaggtccatgggcaaccagggacccatttccctctctgatcctaggcctttcccaatcttccccacttgggtaaaagacccctggtctgactctgacccccgtcaggaccgctgatcacggcttccgtctggcgttcaattgtgtcaggctaagcgcttcaggtatatgaccagtgaaatggcaaaagaactaacataactaaccccatttttgtttaaggggactttacccattcctgcacatggctaggttaattttagaccgctgagataatatgcaaaaacagcaatcatgtagtttttaaaactaactctgggattaaagaagtatgtaaacaactatgttttgtcaaagattttttttttttgagacacagtcttgctctgttgcccaggctagagtgtgcagtggcacgatcttggcacattgcaacctccgcttcctgggttcaagcgattctcctgcctcagcctcccgagtagctggaactacaggcgcccgccaccacgcccggctaatttttgtatttttagtagagacggggtttcaccatcttggccaggctggtctcgaactcctgacttcgtgatccacccacttcggcctctcaaagtgctgggattacaggtgtgagccaccacgcccagcctgttttttcaaagatttataggggcattgtgacccaaccaaggacaaagaagtcatcaacctcctcggaccctagctggcactcagatgtctgcagtggtcacctccttatttttattattattacttttttatggagctagaaaccaggactatagcctctacctcctgggctcgagtgatcctcctgcctcagcctcccaagtagctgggactataggtgcatgccactatgcccagctagttttttattttatttattgttttgtagagatggggtctcactacattgccctggctggtcttgaattcctgggttcaagtgatcctcctgcctcagcctcccaaagtgctggaattggtatgagtcactgcgcctggcctgttggtcacctcttgatcacaatgcccttctcttccctctgcccctaaaaaaaaaaaaaattgtactgatttaagatggtactttaggatgatagtccactgtgttctcggtttgctggctctccaaataaacttgcttttcctcccaccaactgtcatctctcttgagtttggctttctatttttttttttttttttgaggcagcctcactctgtcacccaggctggaatgcagtggcccgtctcggctcactgcaacctctgtctcccaggttcaagtgattctcctgcctcagcctcccgagtagctgggactacaggaatgcaccaccacacctggctaatttttgtatctttaaggagagacagtttcaccatgttggccatgctagtctcgaactccagacctcaggtgatccacccacctcggcctcccgaagtgctgggattataggcttgagccaccacgctcggcccgagtttggctttcttttctgaaaccgagtcttactctgttgcccaggctggagtgcagtggcacaatcttggctcactgcgacctccgcctcccgggttcaagcgattctcctgcctcagcctcccaagtagctggaattacagatgtgtgccaccacaccgagccagtaatttctgtagtagagatggggtttcaccatgttagccggctggtctcaaactcctgacctcaagtgatccacctgtctcagcttcccaaaatgctgggatttcaggcgtgagccaccacgcctggcctgagtttggcttttgagtgttgagcggccaaacctcagtcgggttacagacccacaaggaaacccactgcggaagaaaccatttctaccccataccccaatgtgtgccagctactgtgacctttggaacccatgacccatcttcaacaaaatctcttcttgcctcagttacttctctgaacattcctaccaccttcttgctctaactggaacccagctctcctgtgggccttccaagtggggaggtctccgtgctcctgggagctacttcctgaccattctccctccaccctccccaaaacccccagcgatgaatctcatcactaccttgcttcatgcgtcatctgctgacccagatcatgactcctctcttctccctaattttagctctgggctcacggccgctcccgctgctcttagcatcattctcagtgatttctataaccagatagttcttccgcagccccaacctctctgttccctgacctctctctagtgactttttccttccccaacatctccctctcgtggtcaaacccagaccttgtttgaataacagcagcctcttcagaacctcaatctcacactcactctccacccatcactttttctttccacctcattccctccagtgccccactcgcatgatccttccaacccactgtgatctcccatccgttgtccctttcatattttactccccctcaccctcccatgccctcatttcttccttagccagcttaaattccatggttaatcattaaaaacattcttgacctggcacgctggctcatgcctgtaattccagcactttgggagggcaaggtgggaggactgcttgaggccaggagtttgagatcagcctgggcaacacagcgatactccacctgtacaaaaaataaaatgaaaaaattagccgggtgtggtggtgcacacctgtagtcccacctactccagaggttaaggtgggatgatcgctggagcccgggagttggaggctgcagtgagctatgattatgccactgtactccagcctgggcaacaaagcgagaccctgtctctaaataaaataaaaagaatagcaaaaaaagtggggctgtagctagaaggggaggtgaagtcaagagagggtttgggctgggcacggtagctcacacctgtaatcccagcactttgggaggctgaggtgggcagatcacttgaggtcagtagtttgagaccagcctggctaacatagtgaaaccccatctctactaaaaatacaaaaattagctgggtgtggtggcgcacctgtaatcccagctactcgggaggccaaggcaggagaattgcttgaacccaggaggcagaggttgcaatgagctgagatcgcaccactgcactccagcctgggcggcaaagtgagaccctgtctcaaaacaaaacaaaaacaaaaacaaaaaaagagagagggtttgttttgagatgggagacaggatgctgtgtgggctaacaggagatccagtgcatgggggaaactgaatgagcagcagagagaggtgagaaccagggacggtggctggaagtgggcgggaaggtgggagcaggtgatgggacagtcacagcaggagaacgggtgtgggcaagggtgcaggtaggtggtagaggcgggggtggctgtggaagttcacttctcatctcttgcattttctctgcaaaataagaagccaagggagagtgaaagggggggaggaggtgttggaaaggattagaggagaagggaaaaggtgtgaattagttgtctagaagacaggaggaaggaggggatcagagaaatgtcatatggctgccaggcagcattggggtccgcctgagggtcaagttcacagacttgaaattagcctggccagggggctgtgttgttttttagctcactcaagctgtgtgggtgcaggcacggcagagaggaaggctggatttaaccagggtctcatgcaggaggaagccaaagtgggcaagggtgtgtgcagagaatgtgttattttttatttatttacttttttgagatggagtctcgatctgtggcctaggctggagtgcagtggcgcgatttcagctcactgcaacctccacctcctgggttcaagcgattctcctacctcagcctcccaagtagctgggattacaggcctctgccaccacgcctggctaatttttatatttttagtagagacagggtttcaccatgttggccaggctggtctcgaactcccgaactcaggtaatccacctgcctcagcctcccaaagtgctaggattacaggtgtgagccactgcgccgggccgagaatgtgttttttttttttttttttgagacagagtttcactcttgttgcccaggctggagtgcagtggcgcgatctcagctcactgcagccttcacctcccaggtttaagcaattctcctgcctcagcctcctgagtagctgggattataggcgcccgccaccacacctggctaatttttatatttttagtagagacagggtttcaccatgttggccaggctgttctcaaactcctgacctcaggtgatccgcccacctcagcctcccaaggtgttgggattaacaggcgtgagccactgcgcctgccctgacaatgtgttattttattattattattattattattattattattattattattattattatttttgagacggagtcttgctctgttgcccagcctggaatgcagtggtgcgatgtcggctcactgcaagctccgcctcctgggttcacgccattctcctgcctcagcctcccgggtaactgagactacaggcgcccaccaccatgcccagctaatttttttgtatttttagtagagacggggtttcaccatgttagccaggatggtctcgatctcctgacctcatgatccgcccgccttggcctcccaaagtgctgggatcacaggcgtgagccactgcaactggccttttatttttatttttgagacagggtcttgcttcttcactcgggtgggagtgcagtggtgtgatcatggctcactgcagcctcaacctcccaggctcaagtgatcctcccacctcagcctcccaaactgctgggattagaggcatgagtcaccgcatgcagcgtctttgtttctctttgtggtaaaacttctcaaaagagctgtctacccagtattttctgcttccattctttctaaaacattttctttctttctttttttttttttttttgagacagagtctccctctgtcacccagactggagtgcagtggcacaatctcagctcactgcaacctctggctcccaggttcaagtgattctcgtgcctcagcctcctgattagctgggactacaggtgcgtgccaccaggccctgcttatttttgtatcgttagtagagacagggtttcaccatgttgcccaggctggtcttaaactcttgggctcaaaggatcctgctgccttggcctcccaaagtgctgggattataggtgtgagccactgtgctcggctccagctccacttcttgctataaattatatgaccaatggcaagtcacttaatctctttatacctcagtttccctttctgaaaatggggctgctaacggtgcctccatcatagggctgttgtgaggatgaaatgagtattttaaagcacttaggaaaagcccctgtaggctcctaaataagagtgatattaatttaatattagtccaggcatggtggctcacacctgtaatcccagcactttgggaggcttaggtgagcggatcacctgaggtcgggagttcaagaccagcctgggcaacatggcgaaaccccatctctacaaaaaatacaaaaagtagcggagcgtggtggtgggcacctgtaatcccagctactcaggaggctgaggcaggagaatcacttgaacccgggaggtggaggttgcagtgagctgagatcgtgcctctgcactccagcctgggcgatagactgagactctgtctcaaaaaaaaaaaaaaaagatgatgtcaggaatttttgctacattcatggactacttgcctgacacaggcttatttcttttttttaagtaaaaccttaatttgtttaaaaatgacaatagctgacatgaattgagcacttattgggcacatgaagataacaagcattagatcattaaagcctcttaaccaagggcatcctcaaaggagagttttgcccattaaacaagatgatagaattcatgagctgatccagcttaaatgctcagcaccgtggcttaataagggccaataaatgccactaaatgaaaatgtcacagctaaaatagttgctgtcagccaggcacagtggctcatgcctgtaatcccagcattttgggaggcggaggtgggtggatcacttgaggtcaggagttcaagaccagcctggccaacatggtgaaacctgtctctactaaaaatacaaaaattagccaggcatggtggtgggagcctgtaatcccagctactcaggaggctgaggcagcagaatcgcttgaacctgggaggtggaggttgcagtgagccaagatcatgccactgcacacagcgagactctgcctcaaaataaataaataaataaaatagttgctgtcactttttaaaaatgatgtgtcataataatggcaactaacataatttagtgtttcacattaatttttaaaatattaatattaattttcacaggtgtgagccaccatgcccagcctctgacatcatctttattcctaccgcagaaagaatgaagctgtggagacagactttacaaagaccaagctgtgcttttctccaggtggttctgagttgcattaatagttcactgaggcccggcgcttgaacccgcgaggtggaggttgcagcgagcagagatcacatcactcactgcacttcagcctgggtgacagagcgactctgtctcaaaaataaataaataaattccctaggtttataaacaagtctaccagtctgcctggcatgggtgtgatgtgcaccagagtttagtttcctggagttcttcttaggaggagttcttagttcccactcttcttcttttttgtttttttgagacggagtctcactctgtcgcccaggctggagtgcagttgcatgatctcggctcactgcaacctccgcctcccgggttcaagcgattctctgcctcagcctcccgggtagctgggattacaggcacctgccaccacgcctggctaacttttgtatttttagtagagacagggtttcaccatgttggccaggctggtcttgaatgcctgaccttgtgatccgcccgcctaggcctcccaaagtgctgggattacagacttgagccactgcgcccggcagttcctgttcttcttaggagtgtgttcccactggcaaaaggaggatctctggggctaggggtaggcccctcgcccaacaagggcagccagacttcaccaaggagcagagatgttcaagaaatgtactgaatgagccctcagctatccacacaaaccatattaaatgcttgtatggggccccagtgtggtggcttacgcctgtaattccagcactttgggaggtggaggcgggaggattgcttgagcccaggagtccaagaccagcctaggcaacatgacgaaaccctctctctacaaaagaaatacaaaaaaattagtcaggcatagtgtcatgcacctgtagtcccagctacttgggagctgaggggagaaggatcacctgagccagggaggttgaggctgtggtgaatcgtgaaggggccactgtattccagcccaggcaatagagtgagatcctgcctcaaaaaaaaaaaaaaaaaagtttgtggccagtcacagtggctcatgcctgtaatctcagcactttgggagaccaaggtgggtggatcacctgaggttaggggtttgagagcagcctagccaacatggtgaaacccgtctctactaaaaatacaaaattagccaggtgtggtggcatgctcctgtagtcccagctacttgggagactagtgggagaatcccttgaacccaggaggtggagattgtggtaagctgagattgtgccactgcactctagcctgggcaacaagagtgaaactgtctcaaaaaaaaaaaaaaaaaaaaaaggaaagaggaaagaaacacgaaaagtggctcaacagtcaaagacaggcttattttggagaataagcctgagaggggcttctggccaattttgggaaaggttgaaaagtacccactgcaagattgaatgccaactactagctgggtcacaataggacaagtagggcctagtattgcctgcttccagggtttttgggagagtgtgtgtttggaggaaggttactggctgtcagagtgaccggggaatgctattggtactcagctacccaaagggacccaggatgctactacagcagactgtatttttcaaaagtggctatgagaacatttcctatctgacacgctttttcagttcaccactgctcgtgaagctgtggggtccacattcctcccctgggcacgtgcaggcttttgcaactgcctcaactttcagagcactgcagaagggacattgctaagggatttcattctctctctctttctctctctttttaagagacaaagtctcactctgtcgcctggttggagtgtagtggcgtgattatggctcactgaagcctcgaactcctgggctcaagcgatcctcccaactcagcctcctgagtagatgggactgcagacacatgccaccatgcccagcttcgtttgttttatattttttttttctagaagtgaggggtctccctatgttgcccaggctggtctcttcctgggctcaagtgatcctgtcgccttggcctcccaaagtgctgggattataggtaggagccactgtgcccggcctgctaagggatttctgaggctggatcataaaagagtatgcagcctctgcctgtctttctttctttctttctttctttttttttttttgagacagagtcttcctctgttgcccaggctggagtgcaatggcccaatctcggcccactgcaatctccacctcctggattcaagcaattgtcctgcctcagcctccagagtagctgggattacaggcacacgccaccatgcctagctaatttttgtatttttttttttttagtagagacgggatttcaccatgttggccaggctggtctcgaactcttgaccttgtgatcagcccaccttggcctcccaaagtgctgggattcattaggctgtgcaatttgtgcactttctataaaaggtttgctaaaaatgagctgggtaccatggcttatgcatgtcatcccagcactttgggaggctgaggtgggaggatcgcttgaacccgggggttcgagaccagcctgggcaacacagtgaaaccccatctctaaaaaagtaaacattaaaaaattagctggacctggtggtgtacacttgtagtaccacatactcgggaggctgaggtgagaggattgcttgtggccaggagttcaagggtacagtgagctatgattgcactactgcattccagcctgggtgacagagtgagactctgtctccaaaaacaaacaaataaaaaacaccaccaccactaccaaaacagaacacatacccaaaaccctcaacgtttgctaaaaatgatgaaaacaagaaaaacagatatggcagtccatggaaaggaacaaaaagatgtccaaaaactttcctcaaagccatcaaacaaaagatgttactattttaaaatagaagaatctgtgaaaatgattaagagttagcttataagtatctcctcagcagattctcaaattgtatagtttttttgaggccagagacctttttatactgactggaaaattctgcacaaaaaatacctctgtgaatcatgataccagtttgtttttggtctgtccagagtataattttgccagagtatatttataataagccattattccttttttttttttatggctctggggactgggatcagctatgcggtcctcacttagggaacttgtgcctttgccgtcagatggtggatggggctgggtcatctgaggcttcttccatcctagtctagcagctgaagtgaggagacccgaacagctggcgctccttagacatttctctctattttcacctggtctgtccagctactttcggaaacaaaccaaataatatcttttttttgagacagagtctcgctctgtcccccaggctagagtgcagtggcacgatctcggctcactgtaacctccgcctcccagattcaagggattctcctgcctcagcctctcgagtagctgggattacaggtgcgtgccacccacaccggctaatttttgtatttttagtgaagacagggtttcacatgttggccaggctggtcttgaactcctgacctcaggtgaaccacctgcctcggcctcccaaagtgctgggactacaggcatgagcccctgcacccggccactttttttttttttttgatatggagtcttgctctgtcgcccaggctggagtgcaacggcatgatctccgctcactgcaacctccgcctcccaagttcaagcaattctcctgcctcagccttctgagtaactgggatcacaggtgcgcaccaccacgccaggctgattttttgtatttttagtagagacggggtttcactgtgttggccagtctggtctcgaactcctgacctcaagtgatcctcccgccttggcctcctaaagtgttgggattacaggcgtgagccactgcgcatggcccagataatatactttcatcttcaaggttcattgtattgaacgggttttactaacacagcagcagcctcaattaactgtgttcattttataaagtattatttttactttattagttaagttttattaattgtatctgtttaaaatgtagcaattttatttcaattgattttaaatctttttttttttgagatggcgtcttactctgtcacccaggctggagtgcagtagcatgatctcagctcactgcaatctcttcctcccaagttcaagcaatccttccgcctcagcttcccaagtagctgagattacaagcgtgcgccaccacacccagctaatttttatattttcagtagtgatgggatttcacatgttagctaggctggtctcaaactcctgacctcaggtgatccacccaactcggcctcccaaagtgctgcgattacaggtgtgagccaccgctcccagccgatatggaacatttctattgccccaaaaggtttatcccttcccagccaacctccctactcccacccaaagtcaactactattctgttttgttttgttttgtttttgagacgtagtattgctctgtcctccaggctggagtgcaggggcgcgatttcggctcactgcaacctccgccttccgggttcaagagattttttctacttcagcctccggagtagctgggattacaggtgcgcaccaccacacccggctaatttctgtatttttagtagagacagggtttcaccatgttggccaggctggtcttgaactcctgagctcaagtgatccgcctgcgtcggcctcccaaagtgctgggattacaggcgtgagccaccgtgcccggcttctttctgttactataaattcaatttttcttttctataatttcacgtaaatggaatcatatagagtgtcggctatcaacctacgacctcattgttctaagctgcgaaactggagtttggttctagcccacccagggacgctgttaaaaaaaaaaaaaaaaaaaaaagctccgggaacggtggcttacgcctgcctcctgcctggacaagaagagcgaaacttcgtctcaaaaaaaaaaaataaaaaaaaataaataataattggagtttggccctttaaatcttcttcctttgctgactgacatgatgctaagtttttttcagtagagggcgctggagagacgttgtaggaggaaagggtttggcttccagtttccagacttggctcctgcagggcagctactcctgcagcgagcatgcttctccagcctctgactcctacatgcgtgcggtttctttagtgtcaggaagtttctctggcacatggctcctgaaatatggcagtcagcagcacccacctcagctgagacacttccctgtcagctgctctccccaccatcttactgaatggacttctgccgcattctactggtgccgcaccatagggatgcctttgtccttcggtgagccatggccaagactactccagcaaggtcggggtctcagcctggggctctcatctttctcgggctatcttagacttaggaggagtggctgctccttgtatctgctatttctttctttcttttttctttttctttccttttttttttgagatggagtctctctctgtcacccaggctggagtgcagtggcaagatctcggctcaccgcaacctctgcctcctgggttcaaactattctcctgcctcagcctccttgagtagctgggactacaggcacacgccaccacgcccagctactttttgtagtagggacggggtttcaccatgttggccaggatggtctcgatctcttgacctcgtgatccacctgccttgcctcccaaagtgctgggattacaggtgtgagccattgtgcccagtctatttctacattcgttagcattctctttatttcttagtaaccagttcctcttactcaaatcccctatcatagttaacaattctgtatattaaacaatcgctgtttaaattactgtgtggtttgtctcctggttggatcctgactgatacacacagtatgtgtctccttgtgaagaagtcatctgggccaggcacagtggctcatgcctgtaatattccttgagttgtaggcatggcttagggttatttgtcctctccttcagcataatgtccgtgtgattcactcatactttttttttttttttgaggcagggtctcactctgttgcccaggctggagggcagtggcgccatcatagctcactgctgccatgacctcccaggctcaagcaatcctcccatctcagcctcccaagtagctgggaccacaggtgcaccccaccatgcctggctaatttttaaattttttttgagacagggtcttgctatgttgcccaggctagccttgaactcctgggctcagcgatcttcccagcttggcctcccaaattgctgggattacaggcatgagccaccgcgcttggcccatccacttgttgtgtatcaatcagtagtctattcctttttattgctgggtaatagtccactgaacacataatctacaacctgtttatccactcagtatgatggacatttgggttgtttccagcttaggggtattatgaataaggctgctatgaatattcatgtacaagtgtttgtgtggacatatgttttctttgctttttttttttggagacagagtcttgttctatcaccaaggctggagtgcagtggtgcaatctcggctcactgcaacatccacctcccgggttcaagcagttctcctgcctcagcctcccaagtagctgggattacaggtgtgcgccaccacacctagttaatttttgtatttttagtagagacagggtttcaccatgttggccaggctggtctcaaacacctgacctcaagtgatctgcctgcctcggcttcccaaagtgctgggattgtaagagtgagccatcgtgtccagccattttcattgctcttgagtagatacttaggagtagaatttttgagtcacatggcaggtgtatatttaacgttacaagaaaatgcccagcagttttccagcatgattgtgccatctgcattcccaaaaattctatatgcattgcagttgccagcacctggtattggtattgtcaatcttataaaaagtttacacagaatggtttccttttcataccttcaggatactttcctctacccgattctcccttattaatttttgtttgtttgtttgagacggagtctcaccctgtcacccaggctggagtgcagtggcgtgatctcggctcactgcaacctctgcctcccaggttcaagcgattctcctgcctcagcctcccatcccttattaatttttaactattttagccaggcatggtggcttatgcctgtaatcccaacattttgggagaatgaggcagggggattgcttgaggccaggagttccagaccagcctgggcaacatagcaagacctccatctctacaaaatataaaattaaccagacatggttgcaagcgcctgtagtcccagctactcgggaggctgaggtgggaggagtgcttgagctcaggaggtggaggctgcagtgaactatgatcacaccactgtgctccagcctgggtgacagagtgagaccccatttcaaagaaaaaaagaaaagaaaaaaaaattgcatgcagcccctgggaagtgtggatgctgctggtgttactgagtaaagccctccccatctggcatccgggagtgagctcccagcacaaagactgtttttgtccctgctaacatgaacaagtgctgtccacagaacacagagttcacagtcatccatccaacttgaccaagaggccagtgggaaaggactgtatttataacagccccaaatgtcataccagtgacttaaaaacaagcaaacaaaaaaccacagtcacccagcctcttgtttgaaaaagtggcgggatagcaaggaccatcagatgtttaagaaaactagcagcctgaaagagaaacatttaagtaaacaagcagaaggaaagtgaactgaccccagaggaaacagacaattcacaggaccaaaagaacatggaggaaaagaaaaaaccctaactggtacactcaggactggcttcatgggcatgcaacctgtgcgttcacatgtggcccaccctcttttcaatgctccactgtggccatctcaacattctttttcttttcttttttttttttgagatggagtctctctctgtcgcccaggctggagtgcatgacacaatctcagctcactgcaacctccgcctcctgggttcaagtgattctcgtgcctcagcctcctgagtaactgggactacaggcgcccaccaccacatctggctaattttagtatttttatttttatttatttttgagatggagttttgctcttgttgcccaggctggagtgcaacagaatgatctcagctcactgcaatctccacctcctgggttcaagcggttctccagcctcagcctcctgagtagctgggattacaggcacgaaccaccaagccaggctaatttttgtatttttagtagagacgaggtttcgccatgttggccaggctggtcttgaactcctgacctcaggtgatccacccacctcagcctcccaaagtgctgggattacaggcatgagccaccattcccagctaatttttatatttttagtagagacggggtttcaccatgttgggcaggctggtcttgaactcctgaccccaggcaatctgcccacctcagcctctcaaaatgctggaattacaggcatgagccgttgctcccagcctcaacattctttttatttatttatttttatttatttatttattttttgagatggagtcttactctgtcacccaggcaggagtgcagtggcgtgatcttggctcactgcaacctccacttctgggttcaagcgattctcctgtctcagccttccgagtagctgggactacaggtgcgcactaccacgcccggctaatttttgtatttttagttgagacagggtttcaccatgttagtcaggctggtctcgaactcctgacctcaggtgatccacccacctcggcttcccaaagtgctgggattacaggcatgagccaccatgcccggccaacattctcttaaattaaaaattttgtgtgtgtgtgtgtgtgtgtgtgtgtggagatggggtctcactatgttgcccaggttggtctcaaactcctggcctcaaatgattctcccgtctcagcctcccaaagtgctaggattacaggcctcagccaccgagcctggcctcaacattcttaattatttctgaacaagggaccttgcattttcattttgcaatgggccatgcaaattatgtagctagtcctgggaacacttagatttgcaaagatgttctaaacagagtaagaacaggatactataaaaggaagaatgtctacaagaagaaaaagaaatccaaagaaatggattggatgagttactaacagaaaaacgcctctttcaaaatggaaaaattaaagctatgagaaattctaggaaaaacataaaactgtatctgtgttacagctatttgataaagttcacaaaaaaggaatccttttgacctggaggctaggggcattctctttacattggctttacttacgggttttcttgggaaaaagactcttttcaacaaatggtgctgggacaactggaaatctatatgcaaaaagatgaatttagactattacctcataccagaatcaacatgaaattaatcatacatctaaatttaagagttaaaactataaaactttgagaagaaaacaggagaaaatctcatgatcttgtgttaagcagagattttttagatccaacaccaaaaactatgattcataaaagaaaaactggataaattagacattatcataagttaaaacttttgtacttgcacattatatatctgataaagcacttgtgtatagaatatataaataactcataaaactcaatgagataaaccagttaaaaaatggacaaaaggccgggcacagtggctcacgcctgtaatcccagcactttgggaggctgaggcaggtggatcacctgaggtcaggagttcaagaccagcctggccaacatggtgaaaccctgtctctactaaaaatacaaaaaattagcctgtaatcctagctacacaagaggctgaggccggagaatcgcttgaacctgggaggcagaggttgcagtgagctgagatcacgccatcgcactccagcctgggcaacaagagtgaaactccatctcaaaaaaataaaaataaaaaagaaagaaagacaaaagatttgagtagacatttcaccaaagaacatatacaaatgagtaatgagcacatgaaatgatgctccacttcattagtcattaggaaaatgcaatttttttttttttttgagatatggtcttctctgttgctcaggctggagtgcagtggcacgatcttggctcactgcagcctcaacctcctgggctcaagtgagtctcccatttcagcctcccaagtagctgggactacagatgcacccaccaccacattcagctaattgttgaattttctatagagatgggtcttcctatattgcccaggctggtcttgaactcctgggatcaagggatcctccttccttgacctctcaaagtgctgggattatgggcatgagccaccatgcccagctgggaaatgccaattaaattcacaatgagacaccacttcatacccactaccctggctattactcaaactgacgatactgacaggtgtagtcgaggatataaagaaactggaaccctcaggcatcgctggtggggatgtaagatgtacagctaacctggaaaaccattaggcagtttctttaaaagttgaggccaggctcggtggctcatacctgtaatcccagcactttgggagtcctgaggtcaagagttcgagaccagcctggccaacatggtgaaaccctgtctctactaaaaacacaaaaactagccgggtatggtggtaggcgcctgtaatcccagatactcgggaggctaaggcaggagaatcacttgaacctgggaggtggaggttgcagtgagccaagactgtaccactgcactctagcctgggcaacagagcaagactctgtctccaaaaaaaaaagttgaacatggctgggtgcagtggctcatgcctgtaatgtcagcactttgggaggccgaggtaggaggatcccctgagtccaggagttccaggctgcagtgagctatgaatgcgccaccaccctccagcttgggagacagaataagagcctgtctctaaaaaaaaaaaaaaattaaaaaaaaagttaaacataaacttatatgaaacctagcaattctacgactagattatctacccaagagaaatgaaaatacaccttctacctccatgcaaactctcatatgctaatgttcatagcagctttatacatttggaaacactccaaatgtctattagctgatgaatggatatataaaatgtgccatgtccacaaaatagaatatttttaagcagtaaaaaggaataaacatgctatagtatgaataaactccaaagcaatatgctacatgaaagaggccagatgcaaaaggacacatattatatgatgtgcttctatgaaatgaccagaaaagacaaatctttttgatcagaaagtagattagtagttgccttgggctaggctgggaacagagtgactacaaataggcacaagggatattttgggggtgatgaacatgctttgttacggtggtgatggttgcacaactctgtaaagtcactaaaagccacaaagttgtccactttaacagggctgaattttttggtatgtaaattacacctcaaaaaagctgattaaaaaaacacagcaaactttgcaattaaagcatgtagggcttaaatatggaaacagaacagactgtagatgtttccaccttgacaatgtaaaagcaaatgtacagctgggtgcgatggctcacacctgtaatcccagcactttgggaggctaaggtgggatgatcgcttgagcccacgagttcaagacgagcctgggcaacatagtgagacccccgtctctacaaaaaaattagcagggcatggtggcgtgtgtgtgtagtcccagttattagagaggctgaggtgggaggatcgcttgagcccagaagttgaggctacagtgagccaagatcccgccactgcactccagcctgggtgacagagactccatctccaaaaaaaaaaaaaaagaaagaaaagaaaaaagaaaatgagcaaacacaaaacagtgcaatgttactgcaattcactaaaaatactatcaaagagaactcccatacattcctggtggaatccatttggaatcactttggaaaccactgggcttttttttttttttttttttttttttgagactgaatctcactctatcgcccaggctggagtgcagtggcatgatctcgactcactgcaacctccaccttctgggttcaagtgattcttgtgcctcagactcccaggtagctgggattacagctactctgccaccatgctctgctaatttttgtatttttagtagagacagggtttcaccacgttggccaggctggtctcaacctcctgagctcaagtgatcctcctgccttggcttcccgaagtgctgggattataggcatgagccattgtgcctggcccactggacattttttactgaagtaaaaatgaaaatgtgcctgccccatgacccagcaactccaccccagagccagaaaacacatacaagaatattcatggtggtggtgttcctaacagcttcagattggaaaagtcccagatgcctgtccactgtagcacatacaaataagtcattaataagataagatggactactatatagcacaataatacaaatattgcaaatacaaatattataaataatacaaatacaaaataaggaataagccacaagtacccagaacatgaatgattatcaaaagcaaaaaaaaaaaaaaatttttttttgagacagggtctcactgtgttgcccaggctggagtgcatggccacgatcatagctcactgcagcctccaatttctggactaaatcgatcctcctgactcagcctcttctggacctgggaccacaggcacacaccaccatgcctggctaatttttgtgtttttagtagagatggggtttcaccatgttggccaggctggtctagaactcctgacctcaaatgatctgcccacctcagcctcccaaagtgctgggattataggcgtgagccaccacggctggccctttctctcttcgtgtgtgaggatgtcccctctgcaagatgggaaatatgcaggtccacatctgtcatccacaatctacatgttcaaaagctcagaaaaccaacagtttttcccagacccatttggtggcaggagctgacttgagctgtcatgaggttttgtatagtctttagttactcccctgagaatgaacgtgcatttcactgaaggcctattagtgtttgattacacaaatgctcctcagccctactaggggacttatgtaacataccaaatgggctccgtatgacttgcttaatattcaaagtctaggctgggcatggtgactcacgcctataatcccagcactttgggaggtcaaggcaggcagatcacttgaggtcaggagttcgagaccagcctggtcaacatagtgaaacccatctctactaaaatacaaaaatgagctgggtgtggtggtgcatgcctataatcacagctacttgggaggctgaggcaggagaatggcttgaacctgggaggtggaggtggcagtcagccaagatcacaacactgcactccagcctgggtgacaaaggagagtccatctcaaaaaaaaaaaaaaaaaattcaaagtctagactcccaaatgcatctggccccaagagctttggatcagagatgatggacctctaataacccctgcccctcacggttgtagggaaatttcatgagatcagggtctggccctcgacaaatgtttgctgccactgtgaggagttactatgattagcagcaaacacccagctatgggattggaggagtccacgtgggcacctccatatgctgccatcagagactagaagaatgtgggataaggacagacacgcttaggaaaaaacaaggcgaaacacagcaggacaaaaactgaacctctggcacgatcattcgttgaatttgcaaaaggaaaaagaaaataccaagttccaaatctatccctagaaaaatgggtggtgactgggtgctgtggctcacgcttgtaatcccagcactttgagaggccaaggcaggaggatggcttgagcccaagagtttaagaccagcttgggtaacatagtgagacccctgtctctacaaacaaaatttaacaattagccaggcatggtggtgtgcacttgtggtcccagctactcgggaggctgaagtgggaggatcacttgagcccaggaagttgaggctgcagtgagccaagactgtgccactgcactccagcctgggtgagagtgaaaccctgtgccaattaaaaaaaaaaaaagaagaaaagaaaaagggcccagctgcagcagttatgttgacagtgttagtcataggtgaacaggctataatagttaaggagatgccttcacagaatactaacagctactgttaactgagcacttactttgctctaggcatgtgggaattgctttacaaaatctcacagaagcctcaaaccaccccatgaagtaggcacatggggaaactgaggcttggaggatgacagcaacgtgcccaaggtcacccaacaaagaagcaacagagccatgtcaaaagacaaaattacaacaaatttagttatagatctaatgggcttttattcaagattcttgaatggggcagcctccattttacaaaacagactgagacccccactgggtagtaagagaatggtgggttttataagctgggaccaagggaaaagaatgatagaaaaaaacaaacaaaaaaactaggccgggagcagtggctcactcacacctgttatccccagcactctgggaggccaaggcaggtggatcacctgaggtcaggagttcgagaccagcctggccaacatgatgaaaccccatctctactaaaaatataaaaattagctgggtgtggtggcacgcacctgtaatcccagctactcaggaagctgaggcaggagaattgcttgaacccaggaggtcaaggttgcagtgagctgtgattgtgccactgcactgcagcctgggcgacagagtgagaccccatctcaaagaaaaaaaaaaaaaacctgctgggatttgaatcttggtatattggactccatagtttgtgctactgtatacatgtcttctgtctctttctttgtttcaaaataatcttactttattttctcccaatttttactatgaaatttcattctatagacaagttgaaagagtaatcaaatgaacatcactatctgctccatattttgccatatttgcactctctcttttctttttggacagagttttgctcttgtcgcccaggctggggtgcaatggcgcgatctcggctcactgcaagctccacctcctgggttcaagctattctcccgcctcagcctcctaagtagctgggattacaggtacccgccatcatgccctgctaaatttttatttttgtcgagacagggtttcaacatgttggccaggctggtctcgaactcctcagcctcccaaagtgctggcattacaggcataagtcaccggcctggcggccttgatgaactactcttcagtacttcctaatgaatctcctaagattaagggcaacctggccaggcgtggtggctcacgcttgtaattccagcactttgggaggccaacgcgggtggatcacgaggtcaggagttcgagaccaggctgaccaacacggtgaaaccccatctctactaaaaatacaaaaaaattagccaggcgtggtggcacatgcttgtaatcccagctactagggaggctgaggcaggagaatcgcttgaacccaggaggtggaggttgcagtgagccgagattgtgccactgcactccagcctgggcgacagagagagattctgcctcaaaaattcattctgccatcaatacccactccgtgaacaatttcccctgctgtctctagcaggtcttctgtggctgtttcctcctaacaagatccccgtgggggctcaaacaccagtgggggtggcaggtctcactcatctcttttaatctaaaacacttcgttttccattcttctaaaagagattacatacttttattatagaaaaaattaaggcaaacttttctatttgatttctaagccatatgtagaatttgattagaattgaagaaattaatatttacataaatacaaaaatgttattttaaaaatatatctttttgtttgggcgccggtggctcacacctgtaatcccaggacttttgatggccaagacgagcagatggcttgagcccaggagttcgagaccagcctgggtaacacggcaaaaccccgtatccacaaaaaataaaaaaattagtggggtttggtgggggggcgtgcacctgtagccctagttactcaggaggctgaggtgggaggatctcttgagcccaggaggttgaggctgcagtgagccatgattacgacactgtactccagcctgggcaacacagttttgatttgatttgatttgatttgagacagggtctcaaatatatatgtgtatatatatatatacatatatatatatacacatatatatacacacatatatatatgtacatatatagtttttttttttttgagacagagtcttgctcttgtcacccaggctggagtgcaatggcacaatcttggctcactgcaacctccacctccagggttcaagcgattctccttcctcagcctcctgagtagctgggattacaggcgcctaccaccacgcctggctaatttttgtacttttagtagagacggggttcatgttggccaggctggtcttgaattcctgacctcaggtgatccgcccgcctcggcctcccagagtgctgggattacaagcgtgagccaccgcgcacgcccggcctaaaaatatattttttaaaaagaagctccttagccaagccttacaaaaagagagtcaacagatactaggtatatttaatggaacaataaatacaagttaaaaaaattattttatgttagaaaagtagccaatagagaagccgaaagtaatgtcctgactatacagggaggtgattatatagggaggaggaaaaccacggagatgatcaaagttgtctcctatttttagcaagggatccatggacgcgttgtctaaaagttgatgaaataagaaataacaatccaaaaatatgctgtaaagatttggaaatagataccagaggaataaaaagtggaaaaagttaaaaacgaggcaccagcgatcacgagttacttcttgccatttttgaaaagtaatgtagttaacaaaaaaatgtatttggccgacaggggttgggggcggtggtgagggagaggttgttgtttaaaggcgtgttgttttccatgcaaagctctgtcctgtcctacgtgtctgagtgtcgtgtattactggaacatttttaaagaagtattatttattttacaactagactcccataatatttgtctttcaaaatatggagtaaatagacgctgtctaaagttgaagaggcagtatacagagctttcgaacatatcactgaacattgcaaaagtaacttggcagaacaaaatttaaattgagggttggggccgcagcgaaacacataatgtgcccaagttgctaaatcgagaaaccgccctccaaggcttctgattcacagattctgcgaagggactgacggccagaagacagaaaatccagcaacggtaaaaagcggcctggccttccccgggctgttgcgcccacgtgttggtttgcagcgtttggcaggggttttggatggtggcctccgcggacgagcgcagggatggagaggcctgggcgttcgaacacccacgttcaaagcaaagcccttccagatttagggctttctaacgtgcatttgtataactttgggtttaaaggagcctcaggccgagggagggcccgggaaagcgacgctgcgggttatgggactcccagggacccgcccctccgggcagggcctggcgcgggaatccttcccggggcgccccagctgtgggcgagaacgggactgacgcttgggtcccgacctgggtcccctacctgtcccggcgctcacctggcgggctgctcggaggcggcagcggcgggctaagcttccctttcccactttgttctgggaggcagtcgaggggctccccgtgatcggcgtggcccagggggccccgggaccggcggtctgggcggtcggtcctctcccggggcgtggcggctgcagcccggcgccgggggcggcgactctgagatccagcgggcgggggcgggaggccgcccctcctccggctgcggggcccagcgggagcgagggcgggcgggcgggggagcttggagggctgcgtgcagcgagggggaggcccagttgccgcgaggccagcggggagcggggccagccccgcgcccctaggatccggggcccacccctgggagagccacctcctctgggtgtgcgagttccacatccccaagacgcccccgcggggggactggtcctagctccccacccccacccaaattccgtttccttctggtcctggcctcctgcttgcggccgtctccacccctcacatccatgggatcctgcacaggtccacggttggtaaaccgcttagctgtgagcccgacccagggcctgattcgaaacacttggatcaaagtccctggccacagggattttcttgtatttacgttgcttcccagggccagattctcagaagcccggggctgatcttaaattaaatcccttcaccacacgcactctctgtggcaatgacaaacctgtacccttccaccttaggactcccctgtcctccccatccccccagctatagacaactgaattaatccggaggttcagtttcggtcaggctggggccgcgacccattttctccctttacctctgcccttgggtctttgcagtcccttctgatggccctagattgcaccagggacctcaaggtgactgatctcagacaccccagagctagttttctggaagccaggcctcccccacgctggtaaatcattctccaggcccactggctcatatctgccactgtgctaaatgctttgtatgcatgacctcctcatggacgcctctcccgagaaactgaagtccagagatacctggtctgttgcacgtagtccaagtcgctagcttggaggggtcacacagccagagagcctggattccctaaagccccttcccctagaaacctcagccaggccccacagcgccatcgtgaggacggcgtgagactgcgtgtgcagcgcggagcacagtgctggactcagagccaacgctaatttgactactattacattatttgtaacaaccgcctttgaaagcattttctgctgtgggttgtaaaattactgtattattggtagagtttttagcacagatccacacgcagttccttatgtgaaaggcgtaggcctaggtttgttttgcattccggattttggggggtttatttattttattttagttttttgagacggagtctcgctctgttgcccaggctggagtgcagtggctagatcttggctcactgcaagctccacctcccgggctcaagcaattcttgtgcctcagcctcccgagtagctgggattacaggaacgcgccaccacgcctggctaatttttgtatttttagtagagagggggtttggccatgttggccaggctggtctcgaactcttgacctcaggtgatctgcctgtcttggcctcccaaagtactgggattacaagcgtgagctaccacgcctggccgtaagtagccatttcttcatgctgctcaattctctgacatccaggggcttgcatatgtagggacaagaatactaactaatctttgttctttgataaaacattaaacagttgttcctctaagtcttcctcgaaaccagatttccctaatcatttcaacattccttccaaaagccatcgcttaaagccttcccaaatctaatgtcagatgtttgcgattgttgtaaataccttaacaaatagacaaagcaattgtgtgttattataatgattacaaagctaatgcatacttgtgctgacacgtgtcaccagtgtgctgatacccatggacttgagcttgtttctttattgttattattacaaaaagtggaattgtttatttttcatttattgatttatttttgagtcagcgtctggctctgttacccaggctggagtgcagtggcatgatcacagctcactgcagccttgatctcctgggctcaagtgatcctcccacctcagcccctcaagtagctgggactacaggggcacgccaccatgcccggctaatctttgtattttttgtagagatgaggtttcgccatgctgcccaggctggtctcgaactcattagctcaacaatccgcctgccttggcctcccaaaatgctgggattacaggcataagccactgcatctggccttgtttctttattattggtattctagtttttagactcctttcctgcagggagtgtgatttgactcacccaatataaggagccctggtaaccgcctcagacctgctgaggtttcggctttaggtcagagccagtttcaggaaggctgatgattcaggaccggtggagaggcctggggaacctctagcagggcagcccactgaatgcggttgtcactcagagcctgtccatgtgcttggatctgaacaggaagagaggttttatttatggtcttggtcgtgctttccctcggagtcacatttgttcctggtgtctcctcacatggtgcaggctgatgtgcctactttgcagctctttctgctgagcaaggcctgtttctacccaattaaatctaaagccttctatcacaataaaacctcaactgtcattcccatcaaccaagaagaactgaactaggaggccctgacatttgccaatctgatgtgttatcaaatgtttacattggccgggcacggtggctcatgtctgtaatcctagtgctttgggaggcagcaggatcacttgagaccaggagttcaagaccagcctgtgcaacatagtgagacccccatctctacaaaaaatttaaaaattacctggctatgatggtgtgtgactgtggttctagctacttggggggctgaggcaggaggaccgcctgagcctgggaggttaaggctgcagtgagctgtaatggtgccactgtactccagcctgagtgacagagcaagactctatctcaagacaaataaacaggccgggcgcggtggctcacgcctgtaatcccaacactttgggaggccaaggcaggcggatcacctgaggtcaggagtttgagaccagcctggccaacatggcaaaaccccgtctctactaaaaatacaaaaattagctgggtgtggtggcatgtgtctgcagtcccagctactaggagggctgaggcaggaggattgcttgaacccaggaggcggaggttgcactgagctgagattgtgccactgcactctagcctgggcaacacagcaagactctgtctcaaaacaaacaaacaaacaaacgaagtttacatctttgcctatctaagaagtcaaaagaaaacaaaaaaaggtattgccctggtatcttccttcgcatttctcctaagatgaggacattggtcatcttttcatgtgtttaagagctatttgcatttctttctacatagtttgtcattaatcacctttgcccatttttctgcaattactggtcaggtgttgtgttttaaaaatggtgcaatgggccagtgcagtggctcactcctgtaatcccagcactttaggaggccaagtcgggcggatcagaaggtcaggagtttgagactagcctggccaatatagtgaaatcctgtctctactaaaaatacaaaaattagccaggtgtggtggagggcacctgtggttccagctacttgggaggctgaggcaggagaatcacttgaacccaggaggcggaggttgcagtgagctgagatcgtgccactgcactccagcctgggtgacagaacaaaagtttgtctcaaaaataaataaatataaaaaaatacaaatataaatacaaaaattagcctggagtggtggcagatgcctgtaatcccagctacttgggatgttgaggtgtgaagatcacttgaacccaggaggtagaggctgcagtcagctgagattgctccactgcactccagcctaggcgacaaagtgagactccgactcaaaaaaaaaatggtgcaattattgcaaacagtgaaaaatggacggatgtcacatacaaatctaactttccagcctctggagagatggcctacgctatagggcacgtgttctcacagtcccttaccttgtgcagtgcattgcctgggcccatcatccataacgttaatatcctggcttgtggttatctgtggtggtgatagtggcaggaggcagtcaaatcccttggcagataggggtggttccccagtgaaacctcatcttcaagccaaagacagttttaagcctgaaggccaagctgcaagtctcagataaatccacggaccagattgagaacttgtcttcctgtttggtgcactttcctctgattcctccccacccttcatctattttacatgtacctacccttccctaatttttttttcttttctttctttttttgagatggagtctcgctctgttgcccaggctggagtccagtggcatgatcttggttcactgcaacctccgcctcctgggttcaagcaattctcctgcctcagcctcccaagtagctgggattacaggtgcccgctaccacgcctggctcatttttgaatttttaatagagacagggttttaccatgttggccagcctggtctcaaactcctgacctcaggtgatctgcctgccctggcctcccaaagtgctgggattacaggtgtgagccaccacacccagcccgtaattggttttttacactgtcatgcccatctttgaatggtgcctttgttttagcctcttttgcatactcacaaaccaatcagcatgcactcccccattctaagtccataaaagccccagacccagccacactgagggagagaccacctgacttcaggtgggggactaccctcacatcccctctctgctgagagcttttatgtcacttaataataaaaatcttctccacccttctcacccttggattgtaagtgtgatctcattcttcttggacgtgggacaagaacttgggaccctgccgaatgtaggtacaaagaaggcagtagcaccatagctccccacgattggtgcctagcggccaccccatgcaacagaaagcagtggcaagaccaggccagccctggagctacaggccagagtggggcaacataacagaactactaacatgcctcctttcgtcaggctgtggagggactaacagagctgttagcatgctataacaccacctctgggacttcagggtcatgggcttccctgtttgggtgccgccgtgttctccttgtctgaacgccagagtacacagtgggagccgcttgcaacacacctggtccagccacaaaccctacatggagcctgcccctgtgtcagtgcttgcaggggccagtgggaccccacacttgctagttcacacaccccctcccacccaggggctgagtgcaaagtcacggtggctgtgggatccatgccagagtgcaatccagctgtgccctggtgggctgagtgggcagggtgcctcctgcaacaaacctgggaacagtgcaaggccagggcagtggcattgctggccagaggtctctgggcagcaatgtggctgagaaaaatcctgcatcggtggcaactcctgggatgatcctctcgaagcactcagccgggagcctggccctgcagactcctacattatgagcctttagaagacaaaagaaatgcccaaaacaaagcagtccagctttgccttagtgatggctgtcaagggacccagttaatcaattagagatacatctgcactgtgaagatgtgcatagttggagggcagaaagttaaaaattaaaagcttaccagatagagaaaaatctttttttttttttttttcaggcagagtctttctctgtcgcccaggctgtgtgcagtggtgccatctcggctcactgcaacttccgcctcccgagttcaagcaattctcctgcctcagccttctgagtagctgggattacaggcgcccaccaccatgcctggctaatttttgtattattagtagagatggagtttcaccatattggccaggctggtctcaaactcctgaccatgtgatccacctgcctcagcctcccaaagtgttgggattacaggtgtgaaccaccgtgcccggccaggaagatcttctgaacaaaaaaggaaacttgcaaggaatcctcttggaaaatgtagggcacaaaaaatatccatttagatataaatagagacatagagacacaacccctggtagggatagagacaggtacacacacacacagaactgaaggcacacacacacacacacacacacacacacacacacttttttttgttttgttttgagacaaggtcttgctctgttgcccaggctagagtgcagtggcatgatcatggctcatgacagcctcgacctcctgggttcaagtgatcctcccacctcaacctcccaagtagctgggactacaggtgtgcaccaccacacctggcttttttttttttttttggggtaaagatagggtatcaccatgttcccagggctggtctcctgggctcaagcaatccttccgcctcagcttcccaaagtgctgggattacaggcgtgagccacaatacctagacaggcacagactcatagagtaagctccaaaaaaattctcaagccacatgccacctggagagactactgtctgcaagggtgtcacaggaggccgtgtgggggtctgggttgcctcccacctagatactccaggataatcttcttgtctcaaaacctataacttcggccaggtgtggtggctcacacctgtaatttcagcagtttgggaagctggggcaggaggataactttagcttaggaattcgagaccagcctgggcaacgtagggagacctcgtctctaaaaaacaaagatccccccacccaccttaacgtcattatatctgcaaagttatttttgccatataaggaaacattcacaaattccagaggttaggacctggataattttggcagaaggggggattattcagtctaccatacaccatagttatttatttaaattttttttgagacacagtctcactctgttacccagggtggagtgcagtggtgcgatcttggctcattgcaatctccacctcctgggttccagcaattctcctgcctcagcctcccaagtagctgggattataggtgcactctgccacgcctggctaatttttgtatttttagtagagatggggttttactatgttggccaggctggtctcaaactcctgacctcatgtgatccacctgccttggcctcccaaaatgctgggattataggcgtgagctaccatgcctgggctcttttttttttttttttttttttttttttttgagatggagtcttgatctgttgctcaggctggagtgcaatggcatgatcttggctcactgcaacctccatctcccaggttcaagcaattttcttgcctcagcctccctagtagctgggactacagccatgtaccaccacacccagctaatttttttgtatttttagtagagatggggtttcactggtgttggccaggctggtctcctgacctcaagtaatcctcggcctcccaaagtgctgggaatacaggcatcagcaaccacgcctgtcgtcttgctatgttgcccaggctggtcttgaactcctgacctcaagtgatcctcccacctcggcctcccaaggtgctgtgattacaggcatgaaccaccatgtctggctcggaccatagttcttttataataatagtggtcatcattctagtagttgttatctaatcacattttataatcattagttctaaaatattaagtgccaaaataaataaataaaaaagaaaaaaaataaaaataaaataaaatcttaagtgccaggttctgggctaagagatctaggtacagtatcacatctaattcttccagcaactctctggaatagggacctttgctaccctgaagaaacaagtagagacaatagcgctaagaaacagagaagcctaggccgggtgcagtggctcacgcctgtaatcccaacactttgggaggcctaggtgggtagatcacctgaggtcaggagtttgagaccagcctggccaacatgatgaaactccatttctattaaaaatacaaaaaattagccaggcgtggtagcgggtgcctgtaatcccagctacctgggggactgagataggagaatcgaggtaacggttgcagtgagcagagagagtgccactgcactccagcatgggtgacagagcaagactccatctcagaaaaaaaaataaataaagaaatataaaaatacaaaaagttatccaggcatggtggtacatgtctgtaatcccagctacttgggaggctgaggcaggggaatcacttgaacctgggaggtggaggttgcggtgaaccaagatcgcaccattgcactctggcctgggtgacagagcaagactctgtctcaaaaaaagaaattatatatatatatatatatttgtggaatgaatgagtaaattaatatgtgaaagaagctgtggtgttaaaaaatattttaaacaaaaacgatggccggacacggtggctgacgcgttgaatcccagcactttgggaggctgaggtgggtggatcactcaaaatacaaaaatttacccgtctctactaaaaatgcaaaaattagcctggcgtggtggcacatgcctgtaaccccaggtactcgggaggctgaggcaggagaatcgcttcaaccgggcaggcagaggttgcagtgagccgagatcgtgccgctgcactccagcctggatgacagagtgagactccatctcaaaacaaaaaaaaaacctcggtgaagtctggtctgaccccggagcccttaatcaccaccccaggataccccattcacaagcacaagaaacacagttacactcagatgcccccttctctgggcagaggtttcctaagactttgtatatattaagttttgttaattgcacctcactgaaaggtgttggccctctgtgctctccgcctgccatgattctgggattttggtcctccctggcatcgaccctgctgaatccagacagtagagactggggagttgcttgttggtgtcaggggatctctgaaaaccatgggctcaggtcgtgactttgcaaataatacttcccgggggaacactgggcatagcattttttttctttttttgagacagagtcttgctctgtggcccagactagagctcagtggcataatcatagctcactgcagcctcaacctctttggctcaagtgattctctcctctcagcctcccgagcagctgagactacaggcatgtaccacggagcctggataatgttttgtttattttttgtagagacgagttctcactaggttgcccaggctggtcttaaactcctggcctcaactgatccttctgtcttggcctcccaaagtgttgggattccaggtgtgagcctgggcatagattttttataagtcagtgtttgccagatgtcaaatatttgtgctgtggcctgaatgtttgtgtctacccaaatttctgtgttgaaagctaatccacagtgtgatggtattaaaaggtgggatcttcaggaggtaattagcacttgagggtgggcccctcattaatgggattagtgcccttgtaagggattgaagagaccagagttctcgccttctgccacttgaggacagagtccaaaggcaccatgggctgggcactgaggctcatgcctgtaatcccagcactttgggaagctgaagagggagcattgtttgagcccaggagttcaagaccagcctgggtaacagtgtgaaaccccatctctacaaaaaatataaaaactagccaggtgtgatggtgggtgccagtagtcccagctactcaggaggctgaagtgggaggatcgcttgagcccgggaagttaaggctgcagtgagctgagatcgtgccactgcaccccagcctgggggacagagcaagaccctgtgtcaaaaaaacaaaaacaaaaacaaaccaaaaaaacccaccatctatgaaccagagaatgtgccctcaccagacaccaaatctactggtgctttggtcttggacttcccagcatccagaacggtgagaaatacatttctgttgtttattgaaatacccagcttatggtattttgctacagcagtccaaagggactaagacagtttgtaagtggatctcctttgaagatccaggctcaaaaagaaaggcagccagtggctttggtctagctggccagctgggtcaccagggacctgtgcattcccagaggggctagcccatgggaagaggatttgaaaagaaatgtgagaatcttgcttcacagacaatatttccctgggggagagaaagagaagagcatgtttacatgaccagtttcatgtgtattagtggtgggttgccctaccactagaaatacacattcctaggagagaatgtaaatttccttccttccttccttcctccttccttccttctttccttccttccatccttctttcctcccttcctccctcccttcctccctcccttcttttctttctttccttctttctctctttccttctttctctctcctactttcttatttctttctttttgagatagggtcttgctctgttgcccaggctggagtgtaatggtgcaattatgattatgatctttcttttcttttccctctctttcttccttccttcctttccttccttcctttccttctttccttcccttccttcccttcctttttttttgagacggagtctcgctctgttgcccaggctggagtgcagtggtgtggtcttggctcactgcaacctctgcctcccgggttcaagcaattctcctgcctcagcctcccgagtagctgggattacaggtgctcatcaccacgcccggctaaattttttttttttgagatggagtctcactctgttgcccaggctggagtacagtggcatgatcttggctcactgcaagctctgccttccaggttcccgccattctcctgcctcagcctcccgagtagctgggactacaggcacccaccaccacgcctggctaatttttgtatttttagtagagacggggtttcactgtgttagccaggatggtctcgatctcctgaccttgtgatccacccgcctcagcctcccaaagtgctgggattacaggcgtgagccaccgcgcccggccaattttttgtgttttttgtagagacagggtttcaccgtgttggtcaggctggtcttgaactcctgacctcatgatcagcccatcttggcctcccaaagtgctgagattacaggcatgagccactgtgcctggcccaaatttttttatacattgcaaatacttaaaacaccaaatagcccagatgattctttttttttttttttttttttgagatggagtcttgctctgtcgcccaggctggagtacagtagtgcaatcttggctcactgcaacctccatcgcctgggttcaaacgattcttctgcctcagccccccaagtagttgggattacaggtgcacaccaccactcctggctagtttttatatttatagtagagatggggtttctccatgctggccaggctggtcttgaactcctgacctcaggcaatccactcgcctcagcctcccaaagtgctaggattacaggcttgagccaacgtgcctggcctgatgattcttaaatataatataaaagtcttaattctggggctttgatttccttcatctctgtattcaattttaaggcttcgtggctgaacatgaaaagacacataagaaaacaattttattggccaggcacagtggctcacgcctgtaatcctagtactttgggaggccaaagtgggagaatcactggaagccagaagtttgaaatcagcctgggcaacaaagcaagaccctatctctgttcttatttgttattattttatttatttatttattttttgagatggagtcttgctgtgttgcccaggctggagtgtgcagtgcagtggcgtgatctcaactcactgcaacctctgcctcccgggttcaagtgattctcctgcctcagcctctggagtagctgggattacaggcacctgccatgacgcccagctaatttttttgtgtatttttagtagagatggggtttcaccatgtgggccaggctggtcttgaactcctgacctcaaatgatccatctgccttggcctcccaaagtgctggaatcacaggcgtgagccaccacgcccggcctcttatttattattgttttttgtggtggggacagggtctcactctgcagcccaggctgaagtgcagtggtgcaatcatggctcagtgcagcctcagcctcctgggctcaagtgatcttcctgctttcgccttccgaacagctgggactacaggtgcgtgccaccacatccagtcaatttttctattttttgtagagacagggttttgccatgttgcccaggctggtctagaactcctgacctcaagtggtccacccaccttggcctcccaaagtgctgggattacaggtgtgagccacctcctgtctcacctcacaggagtgctggcctcctgtctctattcctaaaaaaaaaaaaaaaaaaaaaaaaaaaaagaaagaaagagaaaagataacaattttgctagctaggtgagattaattcttggccagataatttattattgggaagggagttctgactttctagttacggaaaaaaaaccttagcctggcatggtggctcacacctgtaagcccagcactttgggaggctgaggcaggaggatcactggagcccaggagtttgagaccagcctggacaacctagggagacccccgtctctacaaaaaatttaaaaaattagatgggcatggtggcatgcacccatggtcccagctacgtgggaggctgaggtgggagaatcgcttgagcccaggaggtcaaggctgcagtgaggtgtgtttgcaccatagcactataacctgggcaacagagcgagaccctgtctcaaaacaaaacaaaacaaaacaaccttttcaaaaatgctgctgagcccttctaaaattgttaccataacaaatgggcttcatgggctacaaaggtttggtcctctggccttcagtctgggttcatggtgtaccatcagctcactttcctaaccagtgacattagagggaagtctgtagctacccaggtggctcgcggctggactggcatcagccggtctctctgtcgcccagctctattctgcattctttctgcattccatctcaccgtctggcctggccacggcccctgagagtagttacatgatgcctggcaggccgatgatattgcctgtcaccccttcggccagctttcctcctggccaggctgatgttggggttgtgacccagagatgaacaggcaggtctcagggggccccttggggaggctgtagattgttcctgggagggatcagctctcataatgtcaacagagtgcaagggggatgcaactcatctgtcatctaccagcccaggggcggcaccgtgtgtggctgccaggctcagcttacaaacctcagagtctggagacctggaggaggggaggcgaggagcccatgttgggggagatcaaataacaggctctgggcaggctggagggggacagagggaggaggctggccaagcaatctccaagcccagccctgccaccagtcaatccacagatgagcgcctactgcatgcagccctccctccctccctctctccctccctccctctctccctccctctctctctttctccttctttctttccttctttcttgctttctttctttctttctttctttctttcctttcttttttctctctctctttctctctctttctttctttctctctctgtctctctctctctttctttctttctttctttcttcctttctttcagacagggtctcactctgttgcccaggctggagtgcagtggtgccatcatagctcactgcagcctccaacgcctacactcaagcattcctactgcctcagcctcctaagtaactgggattacaggtgcacaccaccacactcagctaatttttttatttttatttttttaatagagacagagtttcactatgttgcccaggctggtcttgaactcccgggctcaagtgatcctcctgcctcagcctcccagagtgctgggattacaggtgtttgccaccacgcccagcctaacacctgttatgtgcagtgcgctctcttagggttctgctgtctcgaaggtggaggagtgataacccagctgcgggatgatcctgtctgagggatgatggcagaagtcaggcgtgttctgaatgtcctttgaaggaaagataaaaggatttgctgctggactggatttggtgtgagaaatggggagagacaggagtccaggacaaggccaggctcttgggtctggcagctggtgaaataagagtgccgctccctgaagatggcgtgcggaatctgaataggttcagaaggttgcaaaatctttctgggtatgtgctatgaacttcaaggccaatgtttctctacattttgtaaccatagtctgagtaagaaatgcattctggccgggtgcggtggctcacacctgtactcccagcactttgggaggccgaggtgggtggatcacctgaggttaggagttcaagaccagcctggccaacatggtgagaccctgtctctacaaaaatacaaaaattagacaggtgtggtggcgggcgactgtaatcctagctactcgggagggtgaggcaggacaattgtttgaacctgggaggcagagattgcagtgagctgagattgtgccattgcactccagcctgggtgagagagtaagattccatctaaaaaaaaaaaaaaaagaaatgtattttacacaacaatcaatacacctgaaagtagaatttctgcagcaatgtttacccgttgctgtgtgcagtgcactctgatgttttctattgaatttcattttttaaaaattgtgctggttgtgacttttatccgttggtcatgatctaaaaattgaaaattatcattctaggttctacctcttcaagacttagcttgagttctttactgccctggagaagtctgggagtgtggccgggtgaccacggggcagccagagcctggcagggatgactggaaggaggggagctaagactttgcagtgttcctccagggatgatgatgtaatcatggaagggctcaaagcctttcccaaggacagggtcaaggctactaagtccaagtagcagggacaggcacagcccggccagtaagggtgtgtggcccggggctggtgcctcccttactccctggtcctgcagaggacgcctgggatctgcagcactgtggcaatgacatgttggggagaagggaccctcgcaggctcccagacctgctttgtgacttactgagtgagtgcccgacccctgcctcaccagccctgggcttcagagcctgagaatgaaacccgcccttcttccacctcctctcctgcccatctccttccctccttcctcttcccagctggtgccacgaggagctggcggacctccaagagaattggccaagaatgcagcctctggacagtgacctgggtgagaatcatcacagtggctcaccccggacccaggaatttcacttagtccttgtcatcatccaccaatgcgggacagctcggcccagattgttcatggctcaagacccccaccccaccccattctgcttggttgggctgtgttgtttattttatttaatgaattaatttatttatttgaaacagaatcttgctctgttgcccaggctggagtgcaatggcacgatctcagttcactgcaacctctgtctcccgggttcaactgattctccttgccatggtcccctaagtagctaggattacaggtgcctgccaccacacccggctacttttcatgtttttagtagagacagggtttcattgtgttggctgggcaggtcttgaactcctgacctcagctgatctgcctgtctcagcctcccaaagtgctgggattacaggcatgagccaccatgcccggccgcactgtgctgtttttaagcctcttgaatatcatcacctctctttgtttacagatggggaaacagtttacagacggggaaacaggctcagagggaaaaaataccttttcagggttttccaggcaaagagtggcagagcagagaccaacctccgcctggccaaagcccttctctgcttcctgtccatttgtgggtgatctggtggtttctccttttctttctttctctctctctctctttcctttctgacagagtcttgctttgtcgcccaggctggagtgcaatggtgtcatctcggctcactgcaacctctacctcacgggttcaagcgattctcccacctcagcctcccaggtagctgggactacaggcgtgtaccaccacaccttgcttttttttttttttttttttttgtatttttagtagagacggggtttcaccatgttggccaggctggtttcgcactcctgacctcaagtgatctgcccaccttggcctcccaaagtgctgggattataggcatgagccactgctcccggccagatctggtggggtttttttgagacacagccagatcttcacagtgccaggtggggtgatgtgcaggactgcagctgtgtctggattctggacaaggctccaaatgatcaccaccatatcttggctgttcagttaggtgggtctgggctagagatgagaaaggaggggtgagggaggaggagaggaatctgagcctcagatctgaggctgcaggcctctctgcatcatctcctcttccacatggtacccacttttgggaaaggcatccggatgtgtgcattgaacagtatacaagggcctgtggtcctgggacaatattttaacacaggctttattattatttgggtatagtaaaaccaagagatcctgagatgacagttattaggaaggttgttgtacttacaaattccaagaggaggggacatgccatactatggagaccacacagggactcaccagggtaggtcaggaggcagagggaacacagggagctctgggcaagaggctttattgtgggcaagatggggacacacagtaaaagcttacttctcattcctgttattgcccaggctgcctgggcagatgctctactccacgcagtcatttagggatccaggctatttccatctagtggccccaccatcctcccaggcctcataatattccactggatcagtccagcaggtgagagggatgagggcatggagagttatgggggagatatttgtgggtcagccccagaaacgtaacacgtcactcctgcccacattctctactgaactgcagaggaggcttggaagtgtagtcaggctctgtgtgcccagaaggaaaacaagacagggcttgatgaacacagatcccagtctctgcattgagagcatttcccagaagccaccgtaagggcttctccttttgagtcacggatcagagctgagtcacatgcacactggcaagaggaaccaggatcaccctgatatctaaaccatcaggatttccttccagacttgggaatgggaggagatgccaacaaactcaaggctgtattagacaggaagtggggatggctaatggataggtgacagacagtttcagccccttcttctcacagctccctgccatttctcctcaccactccacaatccccatccttttttttttttgagacggatttttgctcttgtcacccagactggagtgcaatggcgtgatctcagctcactgcaacctctgtctcccgggttcaagcgattctcttgcctcagcctcctgagtagctgggactataggcacatgccatcacgcctggctaatttttgtatttttagtagagacatggcagcaggcaagagagaaatgagaaccaagtgaaaggggtcccccgttataaaatcatcagatcttggccaggcgcgatggctcatgcctgtattcccagcactttgggagactgaagcaggcagatcacctgaggttgggagttcgagaccagcctggccaacatggagaaaccccgtctctactaaaaatacaaaaattagctaagtgtggtggtgcacgcctgtagtcccagctacttgggaggctgaggcaggagaatcacttgaatctgggaggcagaggttgcagtgagctgagatcacaccattgtactccagcctgggcaacaaagccagctcaagaaaaaaaaaatcagatcttgtgagacttatttactaccatgagaacagtatgggtgaatccgcctccatgattcaattatcccccccaagtccttcctataacacgtgagaattataggagctacaattcaagatgagatttgggtggggacacagcctaataatatcaccccctccctcactaacctccattagttcttcttccctgagggttgaacagaaaccagccttttgtgttttgttttttatttgttagtttgtttttgagacagtctcgctctgttgccaggctggagggcagtggcatgatatcagctcactgcaacctccgcctcctgggttcaagcgattctcctgcctcagcctcccgagtagctgggactacaggtgcgtacgaccatgcccagctaatttttgtatttttagtagagacggggtttcaccatgttggtcaggatggtctcgatctcttgacctcaaatgatccgttcacctctgcctcccaaagtgctgggattataggcatgagccaccatgcccagccaaaccagcctttttgaaaggctcattccactgttgatatcaaccaattgcccgatgctacctgttttgtgattttgacacaactgaccagcattccttcgtgataagatactatcagtcacagagtggttctggccagtctacagagtttgcacactgagggccctcatgacctcggcttcgccttttgtttttgtttgtttgttttttgagagagtcttactctgtctcccaggctggggtgcagtgcagtggtgggatctcggctcactgcaatctccgccttccaggttcaagcgattctccttcttcagcctccccagtagctgggattacagacacctgccaccatgcctggctaatttttgtatttttagtaaagacggggtttcgtcatattggccaggctggtcttgaactcctgacctcaagtgatctgcctgacttagcctcccaaagtgctggaattacaggtgtgagccactgcacccaaccctctgcttcaccttttgatgtatagggcctaattgtaatgtgtttaaatgttaaattgtaatacatttaaatattcaccccagatgaacatgggatgcatgtgcatatgttggcctactatgcatgcacacgtttcccctttgtgaatattcatagctcctcctgtaacctgttgaatatatatatttggccaccccattcagcataaacccctgtcttcatcttcccaccttcaaagtgcctgtttttggcttctggccagaggctacacttctgagcttgtcagaatagaccacctgcaggctgcaaccccttatgagaaataaagctctcctttccaagtgtatgaacctcatcattcttcagctgacacagctaaatttcagggaacactacaactaaagggaagaagggaagaaaggctgtggggatgctgcttagtttctaccatgacatgatggcaggcacagtgctaagcttgctcatgtatctttttttttgagacagagtctcactctgtcacccaggctggattgcagtggcacaatctcagctcactgcaacctccacctctcaggttcaagcaattctcatgcctcagcctcttgagtagctgggactacaggcacccgtcaccacacctggctaattttttgtattttaagtagaggcagggttttgccatgttgcccaggctggtctcgaactcctgagctcaggcaatctgcccgccttggcctcccaaagtgctaggattacaggcatgaaccactgcacctggctgctcatgtatcgtttaattgaacctcccgcaatcctatgaggatgctggatcagggaaaaggactttggttacaagcagcaggaagtccagttaacattggggcctgctaatacaagggtacttattgtttatttaacaagcactcttgagataagctatcttgggatcttggggttggtctagcagctcagttatgtcttcagggagccagcctgcttctcttcctttccatcaccctcagcatgttggtgtttgtcttagaggttggcagcctcagcggctgggaccataacttcacacacaaaggcaggaagacataggaagggaagggcgcccagcacacttcccctgatgccttcttgagcagaactgggtcaaagggctacctttagctgcaaaggaggctgtgaaagcaaacatccagcaaaggggaacaagctagccacatctggtgtattcttttttttttttttttttttgagatggagtctcgctctattgcccaggttggagtgcaatggcacgatctcatctcactgcaaactccgcctcctgggttcaagcaattcttttgcctcagcctctcaagtagctgggattacagatacccaccaccatgcccagctaattttttgtatttttagtagagacaggattttgccatgttggccaggctggtcttgaactcctgacttcaggtgatctacccgcctcggcctcccaaagtgctgggattacaggcgtgagccactgtgcccagctacgtctggtgtattctaattcatcatccacggctgggcacatggctgcaccaaaaaaaaaaaaaaaagaaaaaaatagctaggttctgttagccaggaagtgggggatggcctgcaagtaacagaatctgccacagtaggaacaaggtgacatctacaatgtttaataatggcatggtatggcggtggccatcattgctgacataggctggggcacctgattagggtctcagacactcccttgtgtgcccctttgattatggagagacaaggaaactccaaagaaggagcaaaagaaaggagggcacttggcagtgaacactcaacaagcagtgtagaagattttaacatttactgcaatcccagcactttgggaggctgaggcgggaggatcacttgaggtcaggagttcgagaccagcctggtcaacatggggaaacctcatctttactaaaaaaaaaatacaaaaattagctgggcatggtggcacgcacctataatccttactacttggaaggctgaggtgggagaattggttgaatccgggaggtggaggttgtagtgagctgagatcgtgctgctgcactccagcctgggcaacagagcgagactccgtctcaaaacaaaacaaaacaaaattaacatttaaatgacctgttcggctgatagagagttcccactccagacccccatgaaggcaatcaagagccctctggttgctctgtggccccctaggaatgttcataaaggcagaacatcactgtctcagtctgtttgtgctgctgtgacaacatatctatgactgggtaatttacaaaaaacagaaatttattttctcactgttctggaggctgggaagtgcaaaatcaaggtgccagaagattcagtttctggtgaagatcactctcagcttccaagataacagctcattttttttttttttttttttttttgagataggatcttgctctgtcacccaggctggagtgcagtggtgcaatcatggttcactgcagccttgaactcctgggctcaagagatcctcccctggccaggcacggtggctcacacctgtgattctagaactttgggaggccaaggcaggcagattgcctgagctcaggagttcgagatcaggctgggcaacatggtgaaacctcgtctctactaaaaatacaaaaattagccaggtatggtggtgcatgcctgtaatcccagcttactctggaggctggggcaggagaattgcttgaacccaggagacagaggttgcagggagctgatattgcaccactgtactccagcctgggtgacagagcgagactctgtctccaaaaaaaaaggtcctcccatctcagccacctgagtagctaggactacaggtgcatgccactgggcccgactagttttttaatattttgtagagacgggggtctcactatgttgtccaggatggtctcaaactcctggactctagtgatcctcccgcctcagcctcccaaagtgctgggactacaggtgtgaaccaccatgcccagccaataaaaaccacaagaatctaatagtcatcccctgggccagaccttgttctaagcacattgcacatattaatatgcagcttgtgcaggtatatacggttatattatatgggtaggtagaatatataatatatatagaataataagtagatactttattggcactattatgtagaggagaaaggtcttagaaattaagcagtttgtagccacgcgcagtggctcacgcctgtaatcccaacactttgggaggccgaggagggcggatcactagaggtcaggagatcgagaccagcctggccaacatagtgaaacgctatctctactaaaaatacaaaaattagccaggcgtggtggctggcgccgtaatcccagctactcgggaggctgaggcaggagaatcacttgaacccaggagacagagtttgcagtgagccgagattgcaccactgctctctagcctgggcgacagggcaagactccgactcaaaacaaaacaaaaaaaataagtggtttgcctaaagcagtggttttcagttgggaatgatttttccccctggggatatttggcagtatctggacacattttttggctctcacaactgagaagcaggggtgctattggcatctagtgagatgaggccagaaatgctgctagacattttccaattcccagggtgggcccttccagccagaattatccagccccaaatgtcaccagtaccaagaatgagaaactctgccctacagacattgctgcccatggcccctggaggaaggtagataatgttcacagcaacatgggtgagaaatagtccccaaactgggggcactagcacactaaggacacaatgacacatagattgtagtccactcccatattggacaaaattgatgaacagtagttatcttcatcaaaatggatgaatctcatattaatgttgaatgaaagatgcaggtcacagaagaatccaggtggtatgctttcatttgtatcatttatatcatttatatcaaacacaggccaggcacggtggctcatgcctgtcatcccagcacttggggcggccaaggtgtgtggatcacttgaggtcaggggtttgagaccaggcgtggtgaaaccccatctctactaaaaatacaaaaattagcaggacgtggtggcggacacctgtagttccagctactcggaaggctgaggcaggagaatcgcttaaatccagcagacagaggttacagtgagccaagatcacgccactgcactccagcttgggcaacagagtgagattccatctcaaaaagaaacaacaacaacaacaaaaaaactacacacacgcacacacactcacacacacgatagatggccaaacactaaaaaaaaagcctgcaagagattattacaaaaaattaggatattgccaagcatagtggctttcacctgtaatcttagtgacttgggaggctgaggtgggaggccagaagtttgagaccagcctgggaaacatagtgagaccccatttctgcagacaaaaaataaaaagttagttaggcatggtggtccacacttgtagtcccagctacttgggatgttgaggtgagaggatcgcttgagcccaggagtttgaggctgcggtgagccatgattgcatcactgcactccagcctggaaaacagagtgaggcctcccactctaaaaaaacaaatcaggccaggcgtggtggttcaagcctataattccagcactttgggaggtcgaggtggccagatcacttgaggtcaggagttcgagaccagcctggccaacatgatgagactccatctctactaaaaatacaaagaattagccgggcatggtggcacatgcctgtaatctcagctactcgagaggctgaggcaggagaatcatttgaacccaggaggtggaggttgccgtgggccaaccttgagtggaggttacaccactgcactccatcctgggtgacagggtgagactccatctcaaaaaaaaaaaaaaaaaatatatatatatataattatatattttatatattattatatatattatatattatatatttaaaaatatatattatatatttaaaatatatattatacatattatatatttatatatattatatattatatatatataaataaataaaaattaaaaaacaaatgagaggctgggcatggtggctcacgcctgtaatcccagcactttgagaggccaaggcaggaggagcacttgaccccagcagtttgagaccagcctgggcaacacagtaagaccccgtctctataacagcaaaaacaacaacaaaaattagccaggtgtgctggctcacacttgtagtcccagctacttgcgaggctgaggtgggaggatcccttgagcccaggagacggagcctgcagtgagctgagatcacagcactgcactccagcctgggtgacagagcaagaccctgtctcaaaaaaaagatcagattattgatgatctctgagtatgatggaagggaaaggaaagcaggcttctaaagcactggtaatattccatttcagaacttagttggtggacagaaaagtattttattgttgtttaaaaataaatacacaagcacacacacttttttacttatgtagggtttcctgggaaacagattctgaggtggagatttgcaggcagatggttttggaggagtgctctgtggggggaaacttctaagggagagaggagcgcaaggtgggcagagggagacgtggaagtgtgatgtgcttgccaccagagcctcagccaggatggcagagaatgcggagctggggtggcctgtccgagggatccccggctgaggcatggagccaggcctttgtacttccttatgaaccagatatagaatgtgggctgcccctggggattggggataaccttgggccagatggctttcttcagctgaagtcccagagagaggtgcagctgtaagccatcagctaccaacaccccaggctgctggcagaaagaatgcctcagtcctaaagagggggtgtgggtggcatattacagcatccagcacgcctttgtacctacgatgtatttgacaacaaaaatttagaaagaggccgggtgcagtggctcacgtctgtaatcccagcactttgggaagctgaggcaggtggatcacttaaggtcaggagttcaaaaccagcctggccaacatggtgaaaccccgtctctactaaaatacaaaaattagccaggtgtggtggtgggcgcctgtagtcccagctacttgggaggctgatacaggagtatcacttgaacccaggaggcggaggttgcaatgagccaagatcttgcccctggactccagcctgggtgacagagagagactccatctcaaaaaagaaaaaataaatttagaaagaaaatatattcatgtaatacatcatattaacagatgaaaagatacaaataatttgatagaatttgacactctaggctatgcacagtggcttacacctgtaatcccagcccttttcgaggccgaggtgggaggatcgcttgaagccaggagtttgagaccaggctgggaaacaaagaaagaccttgtttctacaaaaattaaaaaattagccacacactcctgtagtcccagttaatcaggaggctgaggcaggaggattgcttgagtccaggagtttgcggctacagtgagccatgataatagtcttcaatctgataaaaggaacctaccaaaatcctataacaggtatccaacttaattagaaaaattacctttaaagaactgtcttagtccattttatgttgctgtgactgaatacctgagactgggtaatttataaagaaaaggggtttatttcttacagttctggaggctggggagtccaagtttgagggttttttttctggtcagcctctggtgagggtcttgtactgtgtcataatatggcaaaaggcatcatggccaagaggggtgcactgaagtccaaactggctttttataccaaacccactgtggcgataactcacccactcccatgataactcattcaaccattaatttttttttttttgagaaggaatcttgctctgtcacccaggcaggagtgcagtggtgcgatctcagctcactacaacatccgcctcccgggttcaagcgattcttttgtatcagcctcctgagtagctgggattacaggtgcgtgccaccacatccggctaatttttgtatatttagtagagacagggtttctccatgttggccaggctggattcgaactcctgacctcaggtgatccccctgcctcaggctcccaaagtgctgggattacaggcgtgagccactgtgcctggccaatttttgtatttttagtagagatggggtttaaccatgttggccagactggtctcgaactcctggcctcaagtgatccacccgcctcagcctcccaaagtgttaggattacaggcgtaagctaccgtgcccagcctcacccccagtctttcatctgatgcctgacgatgtccaggcaacgtggtaataatcatccagttccattttccttgtatttagttttcctgccgtacatctcaaaaggctgaatcaactcatttgcccatgcatctcctccaccagcacattctcccaagcctccatgggtgacagtttcaacaactggactgtcacctgtgccagggactgtgcttcccctaccccctgggatggtgtcctcattgtcagccaggcaccgagagatttggttcccaagcctcatgttaccatctgctttctcagaccactcctggtagaagctatgcggttctgcttcactaggaagcaatcctgagatggattttgaagtgcaggccagagacgctgcctcacacttataatcccagcactttgggaggatcacttgaggctaggagtttgagaccagcctgggcaacatagtgagaccctgtctctacaaaaaataaaaaattacctgggcatagtggtgcacatgtagtcctacttactcaggaggctgaggcaggaggatcacttgagcccggggggttgaggctgcagcaagctatgattgtgccactgcactcctgggcctgggcaacagagcaagacctcacttccaaaaaaaaaaaaaagtgcaaaagcattttcaaggagttacacttgtgaaatgaaaagtattgaccgggtgctgtggctcaagcctttaatcccagcactttgggagaccgaggtgggcggatcacctgaggtcaggggttcgaggccagcctgactgacacgctgaaatcccatctctactaaaaatacaaaaaattagccgggcgtggtggcgcatgtctgtaacatatatatatatgtaaaggattagataaataaatatcttctgcagtaggactgttgaaagaaaaattaaaaagaaaaaataaaaataaatatagatagaatgtgtgtttatctccatctatccatgtattcatctatcaacattatacacacacacactccctagttctgtccactgagaggtcctgggagtggtgacaccccagtagtaatgaatacaccaagcacccagatatggtgtgcttggtgtgttctacatccctccactatggaagtatgacaggaacttggcacatatcgttgtgccggaaaagtaaggaagtgcttgaggaatgatgagggcatattaaaatgacataggaatcagcctgaaggatctctcaatggccaaatctggggcaattttatttatttatttatttttttttttgagatggagtctccctctgtcacccaggctggagcacaatagcgcgatcttggctcactgcaacctccgcctcctgggttcaagcaattctcccacctcagcctcccgagtggctgggattacaggcatccgccatcatgcccagctaatttttgtatttttgtagagacagggtttcaccatctttgccaggctggtctagaactcctgacctcaggtgatctgccctcctcggcctcccaaactgctgggattagacgcatgagccaccactcccggctaattttagaaccaaaatgaataagaagagtgtgatgaacggaattgtgtctctgtccccagattcatatgttgaatcctaatctctagagtgactgtatttagagacagcgtctttagagaggtaattaagatcacatgaggtcatgagggtggagccctaccccattatgctttgggttttttttttttttttttctgagatggaatctagctccatcacccaggctggagtgcagtggtttgatcttggctcaccgcaacctccgcctcttgggctcaaacgatcctcccacctcactccctgagtagctggggctaccggcatgcgccaccatgcctggataatttttgtttttttaagtagagacagggttttgccacgttggccaggatggtcttgaactcctgacctcaggtgatctgcccaccctggcctcccaaaatgctgggattacaggcgtgagccacagcacccggccaattatgctatgtctttataagaagaaggagagaacaaggatgtgtgcccacaaaggaaaggccatgagagagaggacacagccagaaggtggccatctgcaagccaaggagaggcattaagagaaaccaagcctgccaggctgggcaccgtggctcatggctgacgtagcaggatcacttgaacccaggaattctagaccagcccgggcaacaaagagagatcccatctctacaaaaaaattttaaaaattagccgggcgtggtggtgcacgccttgtagtcccggctactctgggaggctgaggcaggaggatggcttgagcccagggagcccgggaggttgaggccgcagtgagctattgtcgcaccagtgcactccagcgtgggtgatagagcatgacactcaaaagaaacaaaaaccaaaaaagacatcaacctgccaacacctttttttttttttttttttgacagagtctcgtgtcctccaggctgaggctggaatacagtggcgtgatcttggctcactgcaacttctgccttccaggttcaagtgattcccatgcctcagcctcccaagtagctgggattacagcatgagccaccatgcccatctcatttttttgtatttttagtagagtcggggtttcaccatgttggccaggctagtctcaaactcctgacctcaagtgatcgcccacctccgcctctcaaagtgttgggattacaggcatgagccaccacgcccggctatgccaacaccttgatcttggacttccagcttctagaactgtgagaagtaaatttctgttgttgaagcccccaagtctgtgaattttgttacgggagcccaagccaatggatacagagagtaacattgtagcccactgaataaaataggaaaccacaagtcaatactgatatatgtagataaatgaatgaatccaaaggttgatgaagaatgggatatttacagtgttttaaagaacttatgaaacactaattacaaagaggaaagtaacttgacagtgaaggttggctgacaccactttaaatcaagtgatcaaggtgaaatgtcatcaatactgggacaaattgaaattgtgcagcacatgaaaaatgcagtggggacacacagaaaagtctctttggtgatattcttgccaaagatgttataatctgaatctaattataaagaaacatcagacaaaagcaaatggagagacactgtgcaaagtaaaactggcctggccaggagtggtggttcatgcctgtaatcttagcacttgaggctgccgaggtgggcggatcacttgaggtcaggagttcaagaccagcctggcaaacatggtgaaaaacccgtctttactgaaaatacaaaaattggccaggcaaggtggcctactcctgtaatcccagcactttgggaggccaaggtaggtggatcacctgaggttgggagttcgagaccagcccaaccaacatggagaaaccccgtctctactaaaaatacaaaaaattagcctggcgtggtggtgcatgcctgtaatcccagctattcgagaggctgaggtaggagagtcgcttgaacccgggaagcagaggttgcggtgagcctagatcacgccactgaacaccagcctgggcaacaagagcgaaactccttctcaaaaaaagaaaaagaaaaaagaaaaaaaagcacatcccgctaaccacagagatctatcttcgaaagccaagtggcttcctccttgtttctgtatgaattgttttatgtggttcaagacattgactcaggcacagcaagtacagctgaccagtaagttgaagctgatctgaacagtgttcagggctgagacagtgtcctaataatcaggggacaacacacacacgaaatataatcccaggccaggtgctgtggctcatgcctataatcccagtactttgggagggtaaggcgggaagatcacttgagcccaggagttcaagaccagcctgggcaacatagagaaaccccatctctacaaaagatgcaaaaaaggcatggtggtgtgcgcctatagtcacagctccttgggaggctgaggtgggaggatcacttgaggccaggaattcgaagctgcagtgagctgagatcataccactggactctagcctgggtgtctccaaaaaaaaaaaaaaaaaaaaatacagaaaagtacaatcccagagggcacacgtggtgccccctggagacagagagtttacagtttttagggaaccccaggcaggaggtgcattcataagaggttcaggggccccagtgtggtgttccagcctgggcctccagccctaaagttgccagaccagtccaaacggatctgctcagtccttgctgtcagagggaatgcccaaggcagtcaattccagatgggttttgcatgtccatgacaacagtgtctctgcctgaggagtgtggacagcaaccccagctgggcgttctggtggaatatccaggagctgggccaccccaggtggcaggtgagcaggtggaagtatagggatcaaatggagggtcacagtcaatttgaattcaaatcagtccagcagcttggaaaggcaagaccgggtgtttcttcttatttttctttgggaggaggggaaagttctcgggagtagttctgaaaggcagaggtcattactgcccacccccaactctgcatctccccagatgccaagtttgtgtttgggctttttttcaaacattaattaattaactagttaatttttagagacaaggtctctctctgtcacccaggctggagtgcaatggcgcgatctcagctcactgcaacctccgcctcccaggctcaagcgatcctcccacctcagcctcccaagtagttgggactacgggcacatgccaccacgcctggctaatttttgcattttttgtagagatggagtttccctatgttgcccaggttgcccaggctgggctcgaactcctgggctcaagaaatctgcctgcctcggcctcccaaagtgctgggattataggtgtgagccaccgcactctgcctgtgttttggctatttaaaaatgttttattggctaggcatggtggctcacatctgtgatcctagcaatttgggaggcttaggtgagcggttgcctgagcttaggagctcgagaccagcctggccaacatggtgaaacccccatctctactaaaaatatgaaaaattagccaggcatggtggtgcacgcctatagtcccacttacttgggaggctgaggcacaatactcacttgaacctgggaaccagaggttgcagtgagcggagatggtgccactgcactccagcctgggcaacagagtgagactctgtctcaaaaaaaaaaaaaaagaaggttttatttatttaaatataaatggggtctcactatgttgcccaggctggacttgaactcctgggctcaagcgatccttctgcctcagccttttgagtagctgggattacaagcatgtgctaatgtaaccggctctgtttttgcctttttgttacaaaatcagtatgtctcattcggtcattataactttagatttttttccatttttacggaggtaaaattcatacaatatataaatcactattttagccatttaaaaatgtatataattcagtggttttcggtacattcacaatgttgtacaaccatcaccaccatctagttcccaaatcaccccaaacaatccgtgtacctgtgagcagtcactctccatcctccctcctcctccctggcaaccgctaatctatttcctgtctccacagattttccgattctgggcaattcatataaatggattcataaaatatgtggccttctttcatttagcatgttttcaaggttcatccatattgcagcatatatcagtatttcattccttttttgtacgtttgttttgagacagagtctcgctccatcgcccaggctggagtgcagtggggtaatcctggctcaccacaacctctgcctcccaagttcaagcaattctcctgcctcagcctcctgagtagctgggattacaggcacccgccaccatgcccagctaattttttgtatttttagtagagacggggtttcaccatattagccaggctggtctcgaactcctgacatcaagtgatctgcccgccttggcctcctaaaatgttgggattacaggcgtgagcctccatgcccagcctattcctttttatgatggaataatttcccattgtatggatggaccacttttggtttatccattcatcagttgaaggacatttgcttgtttccactctttgtctcttatgaataatgtagttatgaacatttgtgtataagattttatttgagcacttgttttaaatcctcttgggtatatatgtaggagtggaattgctatgtcatgcagtagaattctacgtttagctttttgaagaaatgacaaacggctttctaaagcagctgcaccattttacattcccatcagcaatgtgtgaggataatctccatatcatcaccaacacttgctgttttcttctttttttctttttgctcatattcatcctactgggtaggaagtggtattttactgtggctttgatctgcatctccctaaggattaatgctgttgaacgtcttttcatgtacttaccgaacactggtatatcttctttggaaaaatacctattcaagtcctttgcccatttgaaaactgagttgcttatcttttattgttgagttgtaagaattctttatatattttggatactagacccttatcagatatataatttgcaaaacattctctcccagtctgtgggttgtcttttcattatttggttgtgtcctctgatgcacaaaagttgtggggtttttttttttgttgttgttgtttgtttgtttttgagacagagtctcactctgtccctcaggctggagtgcagtggcgtgatctcagctcattgcaacctgcgtcccctgggttcaagtgattctcaggcctcagcctcccgagtagctgggattataggcagctaccaccactcctggctaatttttatatttttagtagaggtggggtttcaccatgttggccagacttgtctcgaactcctggactcaagtgatccttctgcctcagcctcccaaagtgctgggattagaggtgtgagccactgcacccagcctaaaaattttaaattttgatgaggttaaatttacttttttttttcctattgttgcttgtgcttttagtgttatctaaaaatcaattaccaaatcaagatcataaagagatatccctgtattcttctaagaatgttatagtcttagctcttagtgtttgaggcactttgacttaatttctgtagatggtgtgagataggggcccagttgcactcctttggatgtcgttatctggcaccatttgttgaaaatatgattctttcccccactgaatggtcttggcaccgttgttgaaaatcaattgatcatcgaggtatgagtttatttctggactctcgattctattccattgatttatgtctctccttatgaggtaggaggtgggacttgactccagaggcagggctcggacactggaccaaattgaggactagctgaaacagggctggggtggaatgagctttccgtaagacacgctcatcagttgccatgtcagtttaccgttgccatcgcaacaccagggggttatcccccgtctcttccatggcattgactcgatgacccaaaagttattacccattccctagaaatttttgcacaaatcaccccttaatctgcatgtgtttaaagtagatataaatgactgcaaaactgccctgagctgctagtctctgccagagccctgctgtgcaggagtaatcagagttgtaacagggctggagctataacactgccccttcaataaagctgttttcttctaccattggcttggccttgaattctttcctgggcaaagccaagaacctcatgggctaagtctcactttggggctcacttgtccaacattacttatgccaggaccacactgttctgattactgtagctttgtagtaagttttgaaactggaaagcgtgaatcctccaactttgttctttttcaagattgttttggctatttggaacctcttgcaattccatgtgaattttgagatcagcttgtccatttctgcaaaaaaaatggctcttaaaattttgacaagtggccgggtgcagtggctcacgccagtaatcccagcactttgggaggctgaggagggcggaccacccgaggtcaggagtttgagaccaccctgggcaacatggtgaaaccccgtctctactaaaaatacaaaacattagccgggcgtggtgtcacccgcctgtaatcccagctacctggaaggtggaggcatgagaattgcttgaacctgggaggcggaggttgcagtgagctgagactgtgccgctggactccaccctgggcaacagagcgaaactctctctctcaaaacaatttttttttgataggcattgcaactgaatctgtagatcaatttagggagtattgtcatcttaaaaatataaagtcttccagttgatgaacatggggtatctatttatttagctcttatttaatttctttcagcaatattgtagctttcagtgtaaaagtagaattgttttcttaatttcattttcagattggcattgctagtgtattgaaatacaactaattttcttttcttatttttcgcagagatggcggcgggggagggggggtctccctttgttgccccggctggtcttgaactcttggcctcaagcaatcctcccacctcgcctcccaaagtgttgagaattataggcataagccactatgctgagccctgattttcttttctttttttttttttttttttagacggagtctctttctgtcatcccaggctggagtacagtgacgcaatctcggctctctgcaagctccacctcccgggttcacgccattctcctgcctcagcctcccgagtagctgggactacaggtgcccgccaccatgaccagctaattttttgtattttttttttggtagagacgtggtttcaccatgttagccaggatggtctcgatctcctgacctcgtgatccgcccgtctcggcctcccaaagtactgggattacaggcgtgagccaccacgcccggccgagccctgattttcaatattgatttgtatcccaaaaatgtcctgaatttattaacctttttttttttttttgagacagtttcgctcttgttgcccaggctggagtgcaatggcgtgatctttgcttaccgcaacctcagcctcccgggttcaagcaattctcctgcctcagccttccgagtagctgcgattacaggcatgggcaaccacgcccgacccattttgtatttttaatagagatggggtttctccatgttgaccaggctggtctcaaactcccgacctcaggagatccacccacctcggcctcccaaagtgttgggattacaggcgtgagccaccacgcccagcgtcattttcaaattctcatctaaatgtttcatccagaagggttggatacaaaagggatggaagcatttcacagaagaaacatttttatacaagttgactagaaacacacatcacatccaggaattggtcaggatgaaattctaaattttcttctttttttttgtttgttaccagcttatatatcaagaaaagaagcggggcacgattgctcatgcctgtaatgctagcactttgggaggccgaggaggccggatcacctgaggttgggagtttgagaccagcctggccaacagagtgaaaccccgactctactaaaaaaatacaaaaattagccagacgtggaggcgcgggcctgtagtcctaggtacttgggaggctgaggcaggacaattgcttgaacctgggaggtagaggttgcagtgagtcaagatggcgctactgcactccagcctgggcaacagagtgagaccctgtctcaaaacaaacaaacaaacaaacaaacgaacaaacaaacaacagaaatcctaaattttcaaaatgtttttctataacctctttcccgatcatcatccaatgaacttcctgcaaaagctcaatccctttctggggaccgctgcatcagtaatcaaactgccttcctaaggtgtgtgttgtagcaggagagaagtggggaagtagagtcaggctacaggccacagttgcaacctacaactaatccagaaagttgagcacaaggcaacagaaatgaggcgtctcccaagtgtccaacctgtcagaagcagccagaggggtcacagtccctgagaggtgccctccttgaacttacagcttttggcaggaatcacaggttagaaatacattcgatggccaggcgcggtggctcatgcctgcaatcccagcactttgggaggctgaggcgggaggatcacctgaggtcaggagttcgaaaccagcctggccaacatggtgaagccccgtctctactaaaaatacaaaaattagccaggcatggtggcgtatgcctgtaatcccagctacttgggaggctgaggcaggagaattgcttgaacccaggaggtggaggttgcagtgagctgagatcacaccactgcactccagcatgggtgacagaaggagactccgtctaaaaaaaaattaaaaaaaataaaagaaaataaaaagaaagaaatatagagccaagaagccagttgattgtagatggtttcctcaaagaagaagccctttccttggcctggcgtggtggctcacatctgtaatcccagcactttgggaggccaaggcaggcggatcacgaggtcaggagatcgagaccatcctggctaatacggtgaaaccccgtctctactaaaaatacaaaaaattagccgggtgtggtggtgggcgcctgtagtcccagctactcgggaggctgaggcaggagaatggcgtgaacctgggaggcagagcttgcagtgagctgagatcacgccactgcactccagcctgggggagacagtgagactccgtctcaaaaaacaaaaagaagccctttcctgtgggcatttttatgtgatccagatggtccagtcagcatccatgatgttttcagtttaggtcccacggagggtgccctaagtctgcaatggtctcatagtcgaagtgctgttcctggagtgtgcgcccgtttttaatttagcacagcacatgctgagactgaaacagcacagagcagacagcagtatcaggttttggcttacagtcaggtccaggccagtaggatctgtgaattcaggaagccacaagtcagtggctgttctttggcagcagcaaagccaagatgctgcaggctagaaggttctgtttcaagtgcaagtgacaaacaaggctttcctaagcctttttacctcgtcaatcttagagctggaattggtgcactcaaaaacacgcacgggctggatgcagtggcttgtgcctgtaatcccagcactgtgggaggctgaggcgagaggattgcttgagcacaggagttcaagaccagcccaggcaacatagtgaaactgtgtctctacaaaaaaaaagaaaaaaaaattaaaattaactgggcgtggaggtgggcacctgtagtcccagttacttgggaggccgaggtgggaggatcgcttgagcccaggaggtcgaggctgcagtgagccatgactgcatcattgtactccagcttgggtaacagagtaagaccctgtctaaaaacaaaaaaacaaacaaacaaacaaacaaaaatgcataccttcaagaaaaagagaagacaaccacagaccgggagaagggatttgcagaagacatatctgataaaggactattattcaaaatgtacaaagaactcttaaaactcatcaataagggtggtgtgtgcctgtaatcccaactacttgggaggctgaggcaagagaatcacttgaacctggaagatggagtttgcagtgagccgagatcacgctattgcactccagcttgggcaacagagcaagactctgtctcaaaaaaaaaaaaaaaaggttgggggcagtggctcacacctgtaatcccagcacattgggaggccaaagtgggtggattgcttgagtccaggagtttgagaccagcctgggcaacgtggcaaaaccccctctctacaaaaaaataaaaaaacattagttgaatgtggtggtgtgcccttgtggtctcagctacttgggaagctgaggcaggaggatggcttgagcctgggaggcagaggttgcagtgagccatgatcacaccactacactccagcctgggtgacagagcaagactctgtctcaaaaaaaaaaaaaaaaaaaaaaaaaaaaaaggctgagtgtggtggctcatgcctgtaatcccagcactttgggaggccaaggcgggcggattgcttgagcccaagtgtttgagaccaacctgggcaacaaagcaagacctcatcttaaaaaaaaaagtattagccaggtgtggtggcatgcgcctgtagtcccggctacttgggaggctgaggcaggaggctcgcttgagcccaggagttttaggctgcagtgagccatggtctgatcatgctactgcacttcagcctcggcaacagagtgagaccctgtctctaaaagtgatctatcaagccatgaaaagacctggaggaaccttaactacatatcactaagtaagagaccaattaggtaaggatacatactgcatgattccatcaatatgacattctggaaaaggcaaaactatggagtcaatataaaatcagtggtcggccaggcgaggtggctcacgcctataatcccagcactttgggaggctcaggcgggtagatcgtttgaggtgaggagttcaagaccagcctggctacatggtaaaaccccgtctcaactaaaaatacaaaaaaattagccagacgtggtagcagtcacctgtaatcccagctactcgggaggctgaggtgggagcatctctcgaacccgggaggcggaggttgcagtgagccaagatcatgccactgcactctagcctgggtgacagagtgagactccatctcaaaacaaatacaaaacgaaacaaacaaaaagaccagtggtcctctggggttgagggagggaggagtgaactggtagagcacagaggacttttagggcagtgaaactagtctgtgtgataccgcaatggtagatacatgtcgttacacatttgtccaaatccagagaatgcacgacaccaagtgtgaccctaatacaaactatggagtttgggtgataaggatgtgtcaacataggttcattgattataacatgtaccactctggtgggggatgttgatagcgggaagggtgtgtgtgtgtgtgtgcgtgaggggctgggggaaacgggatataggagaactctgtactttctgctcaattttgctgtgaacctaaaactgctctaaaaataaagtctaggctgggcgcggtggctcacgcctgtaatcctagcactttgggaggctgaagtgggaagataacttgaactcaggagttcgagaccagcctgggcaacatagtgagaccttgtctctaatttgaaaaaaaaaaaaaaaaaacccaaaagccaaaaaaacaaaaattagctgggtgtggtggcacacgcacctgtaattccagctactcaagaagctgaggtgggaggattgcttgagtctaggaggtcaaggatgcagtgagatgagattgcactgttgtactctagcctgggcaacagagtgagaacgtctcaaaaaaaaaagcatattaaataaacgaaactttttcagacatacaaaaaaatatgcacaccaggctgcctcatcagctgcctttaagggtccagcatttgattttaacaagggcttattagcaaactagaaagtgttttttaaaactctaaaagtagctgggtgtggtggcatgtgcctgtagtcctagctactcaggaggctgaagcaggaggatcatttgagcccaggaggtcgaggctgcagtgagccatgatcgcgccactgcactccagcctgggtgagagtgtgagatcctgcctcaacaaataatttttttgctttaaagtgaaactccaaaagtttatttccatccagagattgcgtcgctctttttactgcttcttcctttctccaaaggctccagtaagccaaaatcatggcagaaatcatcgtttacagacactgtacttgttctgtttccaatactcagagaatttaaattccaatcctcccattgttggcaaaaagcaagggatttgttttatacacacacaatgatttttgcagctttccctaatccagatgatcctcatagtgtatagtgcaagcataaacattttacattgattttaaaaaatcatacgtttaggccaggtgtagtagctcacgcctgtaatcccagcactttgggaggccgaggagggtggatcacctgaggtcaggagtttgagaccagcacagccaacatagtgaaaccctgtctcaactaaaaatacaaaaaattagctgggcatggtggcacgtgcctgtaatgccacttacttgggaggctgagaatcacttgaacctgggaggtggaggttactgcactccagcctgggcaacagcgagactgtctcaaaaaaaaaaaaaatcatacatctagatgaaacagtcacaaaatacaaaggagcttttcaaatttctccctttttttttctcattgcaaacctactcaaatgtctatcaataaattcaacacttaatagttggaatagaaggcagggttgctgcaacctgtgggctgaagaaatgggtagaatctacagtcagcctttggtatccatgggattggttccagaaactcccatggatcccaaaatccacagatactcaagtccttatataaaatgcagtgatatttgcatataacctccacacatcctcccatatactttattaattattattttttcgtgatggagtttcactcttgatgctcaggctggagtgcgatggtgcgatctcgctcgctgcaacctccacctcccgggttcaagcaatcctcctgcctcagcctcccaagtaactgggcttacaggtgcccgccaccatgcccagctaattttttgtatttttagtagagatggggtttcaccatgttggccaaaacttacacacataaacacagactttgcatggtaccatttgcagttgagacaaatgtaaatcaatacaaagaggcagtgtgaaatcataattgcacgaaattaactgaagtaatactgtactactgtaataatttcatagccacctcctgttgttattgcagtgagctgaagtgttgtatcagcttaaacaccatgtgatgctaatcatctccaggagttcgtttctccagtaaattgcatagcgcagtaaacagtgatatcttccggttctcgttcatttttcatcctgttgagtgcaatatcgtaaaccctgaataacaccacgggacccatgcaaagtgccactgatgaaactgacagtgctcccaagaagtagacaagtcatgacattacgagagagttgatttgcttgatatgtaccatagattgaggtctgcagctgcagttgcctgacatttcaagatgaattcagcattgaggagcattgtaaaaaaaagaaaatgaaattcccgaagtggtcacagttatgccggcaagcaggaaatccttgcactttttgtgaaatacctttttatctcatactgaaaatgcaaagccaggtgtgatggctcacgcctggaatcccagcactttgggaggctgaggtgggtggatcacttgaggccaggagttcgagaccagcctggccaacgtggcgaaaccctgtctctaccaaaaatacaaaaatgaactgggcatggtggtgggtgcctgtaatcccagctacttgggaggttgagacacaagaatcacttgaacccgggaggcagaggttgcagtgagcccagatcatgccactgcactctagcctgggtgacagagcaagactctatcacaaaaaaaaaaaaaaaagaaagaaagaaaatgcagtttttctgtgggtgcagaattgctataagaaaggcatacttgccgagcacggtagctcacgcctgtaatcccagcactttgggaggccaaggtgggcggtcacgagatcaggagatcgagaccatcctggctaacatggtgaaaccccgtctctactaaaaatacaaaaaaacttagctgggcatggtggcgggcacctgtagtcccagctactcgggaggctgaggcaagagaatggcgtgaacccaggaggcggagcttgtggtgagccgagatcgtgccattgcactccagcctgggcaacagagtgagactctgtctcaaaaaaaaaaaaaaaaaaaaaaaaaaaaaaaaaaaaaaaaaaaaaaagaaagacatacctatagactctaatataattctagaaaagtgtagccattatatgacaacttaaagctaaaggaaggtgagggacataaatctggagagtttaatgccagcaaaggatggtttgataattttaaagagtttggctgaaaaaaatatcaaggtaacaggagaggtggcttctaccaaccaaaaggcagcagatgggttcccaggtgccaatgagaaaatcattgaggagaaaagttatctgcctaaagagggttttttgtttgtttgttttgtttgtttgtttgtttttgagacagagccttgctctgttgcccaggctggagtgcagtggctccatctcagctcactgcaacctccgcctcctgggttcaagcgattctactgcctcagtctcctgagtagctgggattataggtacccgccaccatacccagctaattttttgtatttttagtagagatgggatttcaccatgttggccaggctgatctcaaactcctgatctcaagcgattctccccacttggcctcccaaagtgctgggattacaggcaggagccacacctcgcctggtcatgaagaggtttgtaatgcagactaaagtgccctattctggaaaaaatgcctcaaaggacatttattagtaaggaagagaagcaagcacttaaggcaggtagggataggctgactctactgtttcgtgcaaatggtgtcagatttatgatgaggctgcccttacacagaaaactgctaacctccaagacttgaaagataaagctgccagtctttcagttgtacaacaagaaggcctggacaacaagaacccttcttctggattggttccaccgacgctttgtccttgaagttaggaagtaccttgccagttagttactttgatattagacagtgtccctggccaccaagaaccccacgaatgcaacaatgaaggtgccgaagtggtctcattgcccccaaacacagcatctctaattcagcctctagatcagggggtcataaggacctttaaggctcattacacactgtggaaaggactgtcaacactatggaagaaaagcctgatgtagagaacattagaaaagtctggaaggatgacaccactgaagaggccatccttgttagagaaaggctacaaataccattgagccaaaataataaattcctgcaggagaaaactgtgtctatatgttgtacatgacctcacaggatttataacagagccaatcaaggaaatcattaaagagattgtggatatggcaaaaaaaaaaaaaaaaaggtagggggtgaagggtttcaagccatggatcttggggaaattcaagagctaatagataccacaccagaggaattaacagaagattttttttttttccctgagatggagtctcgctctgtcacccaggctggagtgcggtagcaaaatctcagctcactgcaacctccgcctcccgggttcaagtgattctcctgcctcagcctcctgagtagcagggattacaggcacccgccaccacgcccagctaatttttgtagtttcagagacagggtttcgccatgttggccaggctggtctcgaactcctgacctcaggtgatccacccccatcccaaagtgctgggattacagatgggagccaccgtgcctggccagaagatgttaactgaagatgtttttgacttctttcacaacatggacccctctgtgatacaggaactgacactaaagcaaaccgtggaagaagttttggtgccatatagaaacatttttagagaaatgaaaaagcaaaaagtcagacagaaactatgatgtatttctgtaaagtacctgcctgtcctgcctccctctccacctccatcacctcatccacttttgccacctctaagacagcaagaccagccctcctcttcagcctactcattgtgaagataacgaggatgaagacttttatgatgaccacctccacttactgaatagtaaatgtactttctcttccttataatttgcttaacaacattttcttttctttagcttactttattgtaagaatacagtatataatataataacatacaacatatgtgttaattgaccatttatgttatcagcgaggcttctggtcaacagtaggctattagtagttaagttttgggggaatcaaaagttatactcagatttttttttttgagatggagtcttgctgtgttgcccaggctggagtgcagcggtgcaatcttggctcactgcaacctctgcctcctgggttcaagcgattctcctgcctcagcctcccgagtagctgggattacaggtacctgccaccacgcccagctaatttttgtatttttagtagagatggggtttcaccatgttggccaggctggtcttgaactcctgaccttgtgatccacctgccttagcctcccaaagtgctgggattacaggtgtgagccaccacatccggctatcctcagatttttaacagcaaggaaggtcagcaccccaaccgtcacgttgttcatgggtcaactatataatatttccacatcacttcattctcacggattcaacatggtacttggcatggggcaaattcaagtttttactttttgaaactttgtggaagtttttttccccaaatattttctattctttttttttttttttttttttttttttgagacagggtctcactctgtctcctaggctggagtgttgtggtctcaatatcgggggctccagtgatcctcccacctcagcctgtcaagtagctgagactacaggcacacgctcccccaccacacccagctaattttttaaatttttttgtagagatgggtctcactatgttgcctaggctggtcttgaactcctgggctcaagcaattctcctgcctaggcttcctacagtgttgggattataggcgtgagccaccacatccagtctttcccgaatattgtcttttgtttgagacagagttttgctctgtcacccaggctggagtgcagtggtgtgatcttggctcactgcaacctccgcctcccaggttcaggtgatcctcccacctcatgctcctgagtagctgggactacagacgtgtgcctccatgcctggctaatttttttgtttgtttgtctgtttttgagacaaagtctctgtcgcccaggctggagttcagtggagcgatcttggatcactgcaacctctgcctcccgggttcaagcgattctcctgcctcagactcccagacagctgggattacaggcacctgctgccacgactggctaatttgcatttttattttatttatttattttttgagacagagttttgctcttgttgccctggctggatagcaatggcgcgatcttggcttacggcaacctctgcctcccaggttcaagcaattctcctgcctcagcctcccaagtagctgggattacaggtgcccaccaccatgcctggctaattttttttttttgtatttttagtagagatggggtttcgccatattggcctggctggtctcgaactcatgacctctggtgatccatctgcctcagcctcccaaagtgctgagattacaggtgtgagccaccatgcccagcaatttttgtatttttagtagagacggggtttcaccatgttggctagcctggtctcgaactgacctcaagtgatccacctgccgcggtcccccagagtactgggattacaggcgtgaggcaccaggcccagcctcccgaatatttccaatctacagttggttgaatccacagatgcagaagctagccacatggagggccaactgtgtatgtttatcttattctttttttcccatctggcttatcgaaagctttgagctggccggcaatagatttaatttcttttactcccagttggaggaaagagcacctataaactgtttactgtctttgacccaccaaaaactcattttgggaaagtcttggccctttctcttgcagcctacagaagagagggaaaaaagccaaaggtgtcacttgggccatgcttttcttcctcattgtagccagcactcaccaaaatcagccaggggatccagggagtcagctctctagaggctggacctattgtcttttttttttttttaatttgagacggagtctcgctctttcgcccaggatggagcgcagtgatgcgatcctggctcactgcaacctccacctcccggattcaaacgattctcctacctcagcctcccgagtaactgggattacaggcgcgtgccaccatgcctggctaattttttgtatttttagtagagacagggtttcaccatgttggccaggctggtcttgaactcctgacctcaagtgatccgcccacctcggcctcccaaagtgctgggattataggtgtgagccactgcgcccggcctcagctagtgtttgctttcgtacagttttccctcctcaactgggactacttatgattctcaaccaaggcagtaactctgcatttctattaaaaagatctgaagtggttttggcaaaataagaaatttattacatatgattggcagatacatgctgctgatatattattcttactgtttgaaaaaaagtcaaaataaaaataatgttattttaattttaaataccacacaattacaggtccttgaggatcagggttgggctcagggaattacctcgttttttcagagaaaccagagtgggcagaaccatctccaaattcttttttttttttgagacagggtctcgctctgtcacccaggctggagtgcagtggtatgatcatggctcactatagcctcaacctgggcacaaatgatcctcccacttcagcctcccaagtagcttggactacaggtgtgtactactgtacctggctaacttttgtattttttgtagcgatgggggtcttactacattgcccaggctggtcttgaactctggggctcaactgatcctcccaccttggcctcccaaagtgcagggattacaggtgtgagccaccctgcctgatccaaactttttctttttgagacggagtctcgctgtgttgcccaggctggagtgcagtggcatgatcttggttcactgcagcctctgcctcccgggctcaagcaattctcctgcctcagcctcccgagtagctggaattacaggtgcacaccaccaagcccggctaattttttggatttttagtagagacggggtttcaccatgttggccaggctggtcttgaactcctgacctcaggtgatccgcctgcctcagcctcccaaagtgctgggattacaggcatgagccactgtgcctggcccaaactttttttttttaacgtagactttcagctgcatgacctggtcccagccctgtagctcggaagccccaggaggtgaggttcacacccttagggctgggactctctgagccctaaggatgagattctaagttcagagatgagttgagggcttccctgaagggaccaaggaagtccctgtggcagaaacaacaggagacaagaggtcagtggtgcggaggggaggggatggtacagaggggcctggggctggatcggagggttttggttgggaggagaagagaggggagggcaagaattcttctccaggatgggcattcccccatgctcacttgtgggtttcccctcagtacagtagggcccccccgcaaagcagcagctgcagtaggtagataagatggaagaagcttcttctggtagtttctagaacctgaagacagggcccgtcagggcctttgattggacccaggaattctcagtatgccagggaggtacaagtgcttggttggttaatgaggggtcccagccaatggtcccaggccctggaaggcacagtcaggctgtcttgcaagaagggtagtgctggactaggacagacggactcgcacgatcacactggagttggtcacacgggctccatagtggccagcccagaactgtgtgtcctggccccggtgttcgaaagacacaaagcggacgcccatcttgatgttggagaacacgtgggtgacctgtaggcagaggaggggctcagctccattgtgccacagcctcccctccaaagctgaggttagggccttctggaagatggttattttccaaggatggctataaaatctccaattgggccacatgttcttctagaatcttatagaatcttccactccctcattaaaaagtagaatctggtcgggtgcggtatggctcgtgcctgtaatcccagcactttgggaggccgaggcaggtggattgcttgaggccaggagttcgagaccagtctggccaacacggtgaaaccctgtctctactaaaaatacaaaaaatattagctgggcttggtggcacgtgcctgtagtcccatctactcgggaggctgaggcaggagaatcacttgaacctggcaggcgaaggttgcagtgagcagagatcatgctactacactccagcctggatgatggagcgagactctgcctcaaaaaaaaaagaagtagaatctaactcccttccccatgaatcaaggtgggtttgcttgtcaccaagaatgtggtgaaaatgatgctcagtgactttggccaagtgactttttaaggctaggtcagaaaaagcaaggcagcttctactgtttctctggaaccctcctccctgagcaaccacatgagcaatctgactgcctaggagccgccatggtgtgaggaagcccaaaggagcccaagcagagagatcccatggagaagctctgagactaaatgaagaaagagatgtttggccagccaccaacagctacacacatactacccaccaccctggcctgcagctccaggcatcatcagaatgtcactgtctgaacgctgaaagacaggagccagaactgcccaggtaagccctcctgaaattactgactcacagaaatcacgagaggtagtcaaatgactgtcattgattttttttttagacagagtctcgccccgtcacccaggctggagtgcaatggcgcaatcttggctcactgcaacttctgcctcccagattcaaacgattgcctgcctcagcttcccgagtagctgggattacaggcatgtgccaccacgcccagctaatttttgtatttttagtagagatggggtttcaccatgttggccaggctggtcttgaactcctgaccttgtgatccgcctgccttggcctcccaaagtgctgggattacaggtgtgagccaccgcacccagccagactgtcactgattttaagccactaagttttggggtgatttattttgcagcaataggcccccagcatcctttccccaaacccccataggagactcacgtgaaggcaggcattgttgttccactgcgggatgggatcaggcacagcagagaatttatctagaacagtctggttggcgtctagaagttggacgaggagtctgtacatacagccgctgtcgtgtcgggctccccacctgtgggaggaaggagccatgaaggctggacctgccaccccatctctttgggtgtctgcctaccttgtccgaatgcccttcccatgtgtgcaaatccagttcctctaaagagactcctgggaggtgatctctggacctttggaatgttgtgtcagacaggagtgtctttgatggggacccaggtggtactggataatctaccaatatgatttagggcaggggccagccacactcatataaatagtctcagtggggagtctccggaaagacccacaatgtgactttcggtgggggctgggagtcagggaacgtcagttgacctggaggctgagattaaccacgtgggcaatcgatcaatccatcaggccttgtgatgaacccaagaaacactctggacaccgaggctcaagtgaactcccttggtcaacaaaattccatgcatcttgtcacacatcagtgccagcacggtaacatgtcctgatgccatgggagaaggacaacagaagctctgtgtttgatcttttccctggatgctgctctatgccctccttttcttggctgattttaatctgtatcttttccctgtaataaaccagaagtgtgtagtagctttctgtgagttcgtccagtgaattattgaattgtgaaggtggttttggaagtcctccaaacttgtagttggtaaagatgtagagatggggttttgccatgtgacccaggctggtcttgaactcctggactcaggcgatcttcctgcctccgcctcccaaagtgttgggactataggcgtgagccaccatgcccagtcagattttgtttttaattattactcatcaaactacataacatatttgtgttgttgtgacatatcatgtcagaagcgaggatggtcttagggattccatccccgaactttgtagcaagctctaaacttctcacaaatattgatgcctgtctgggcgaggtggctcacgcctgtaatcccaacactttgggaggccgaggtgggtggatcacttgaggttaggagttcgagaccagcctggccaacatggtgaaaccttgtctctactaaaaatacaaaaattagccaggcgtggtggcaggtgcctgtaatcccagctacgaggcaggagaatcgctggaacccaggaggcagaggttgcagtgagctgagatcgcaccattgcactccagcctgggcgatagagggagaccctgtctcaaaaacaaaaaacaaacaaatattggtgcctggctctcaccctcagatgctcagatttaatgggtatgaatggtgcctgggcattttatgttttaaaagctacctttatgaggtgcggcaaaatttgggagccactgattatcacaatcaaatagtacccactgatcaaaacaacacaaatatgttacatagtttgataagtaataacaaaaaataaaatctggccagccgtggtggctcacacctgtaatcccagcactttgggaggcagaggtgtaaggactgcttgaatccaggagttcaaggccagcctgggtgacatggcaaaaccccgtctctacagaaaatatggctgggcatggtggctcacacctgtaatcccaggactttgggaggcagaggcgggcagatcacctgaggtcaggagttcgaggccagcctggccaacgtggccaaaccccgtctctactaaaaatacaaaaattagccaggcgtggtggtacacacctgcaatccgagctactggggaggctgaggcaggagaatcacttgaatccagaaggcagaggttgcagtgagctgagattgtgccattgcactccagcctgggtgacaagtgaaactttgtctcaaaaaaacaaaaaattcaaaaattagccaggcatgtaaaattagccagtatgcacctgtagtcccagttactcaggaggctgaggtgggaggattttttgaggccaggtggtagagattgcagtgagccgagatcacgccactgcactccagcctgggtaaaagagcaagactctgtctctaaaaaaaaaaaaaaaaaaaaaaatcttattggagatgtatctcttaatgagatggagttggggaatagggttatggtgccttgattaagagtgaatttgctggccaggcacagtggcttatgcctgtaatcccggcactttaataggctgaggtgggcagatcacctgaggtcagcagttcaagaccagcctgggcaacatggtgaaaccccatctctactaaaaataaaaaaaaatagccaggtgtggtggtgcacacctgtaatcccagctactcgggaggctgaggcaggagaatcacttgaatctgggaggtagaggttgcagtgatctgagattgcaccattgcactctagcctgggccacctagtgagactctgtctcaaaaaaaaaaaaaaaaaaagtgaatttgctaaggccccaaatttccaatggccactttgcctggctccccagtagtccttacatctggggaccacaccttagtgaggggcttttttcctataaaactagagaagggggacactgagaaagagattggggaacgagaatcatatgatacttcccacacagatgtaacctatagcagattaattgtgtaatagggggctcatggctgtagtggacctggaatttgactcccataaaaccatctgggtcatatatcccctggaaagtcttcatgcaccccagtttcaagaccatcactacagaggacaagctctggagtcagaatctgactctgagccttatgccaggttctgccaagcccaggctgtgtgaccagaccagggcaagtcatctcccctttctttttttgatggagtctcgctctgttgcccaggctggagtgcagtggtgccatctcagctcactgcaacctccacttcccgggttcaagtgattctcctgcctcagcctcctgagtagctgggactacagacacttaccatgacgcccagctaattttttgtatttttagtagagatgggttttgccatgctggccaggctggtctcgaactccttagctcaagagatctgcccacctcggcctcccagagtgctgggattacaggcatgagccaccgtgcccagactgccatctcccctttcccaacctctcaatttcctgagaagctctgaatgatctgagggcttgaaatacaccttcccacaggatcaaggttcaaaaaaaggtgctcacataaagtacttgctatgtgtttgccatataataattgtcattgcaagagccctatcttgtaaacaggggaaacagaggtatgctgtgacttgcccaaggctacaaagccacagagctagggtttgaatctgggaggtctggctccagaacctaagctcttggctaactatgctgttttctcctcctaaggcaaggagcatctcattcattcacagacaagactgagctgggccaaaggtctctgtactggatctcatcttctgtcttccaatccacatccttttgggcatgagcagaaagtgtgtactctgctaattactagaactgtgagtgtgtttttcacttcacctccctgaacttcagtttcttttctttcttttttttttccaggactgagtctcactctgtcgtccaggctggagtgtagtggtacaacctccacctcctgggttcaagtgattctcctgcctcagcctcccaagtatgtgggactacaggtgtgcactaccaggcccggctaattttttttttgtatttttagtagagacgaggttttgccatgctggttgggctggtctcgaactcctgacctcaagtgatctgcctgcctcgaccccccaaagtgctgggattataggtgtgagccaccatggctggcctgaacttcagattttttatctgtaaggaggggttaggaggcctaaattaagtcacccataaaaaggccatgtcacatgcagtcagtgcttagcaaggggctattttaatcgtcacactcaccagtcagagacacaaatctcaatcctgccactatccagcagttctggccacagaccctcctcctctaggtccaagacctgcttcttgcaacaccagctgggaatgcaggagacagggtaatgagaacaggcaggcctttctcaacaaggggccggacctttggatagcaggggcattcacctgaatgaagtcacgaagcacgtctgagaaggggccccaggcacggttgtcctgttttcctccaccacccagccgtccccaccgtgttgcaccatccactttcggaggccttctgtgaaataaaaaaggcttgtgcccaagttccagtcgcccgcctgttggttcctagtgagaccccgcccctagcccctcccacgtgctcacagtgcagctcactcacctgacccttcccaccgaggccccgcccccttcccctcccaccagctcagggcaaagccccgctcctctggcccttctcactgatttgcagcaaagccctgcccctccaacccctctctcgggctcccagaactgccccactcccacccctcccacaggcaaacggtgaagccctgcccagtcagccctgcaccctgcgtgccaatgctgcctcgtccctccgacacctcccaccggctcccaatgctgccccgcccctccggcacctcacaccggctcccaatgctgccccgcctctccgactcctcccaccggtcccactgcggccctgcccctgcggcccctagtaccggtcccagtgcggccccgcccctccggccccgctaccgctcccactgtggcccagcatcctggacttcctcttccgagatcccaccttggccgcaggggttgcgaataaggttgcgtccgatgggtctgcgcgcgcagaagcggcccagggggcaaggcctggcgttacgggcgggagactggcagctgcgggcgaggtgcagcagcgcgcggccggtggcgccgtggtcgcgggccaggatcagcagccacagggcctggccgtccaccagggctcgccagccccggcacacttggcggcagcgcccgagcagcgtgcgcggggggacgtggctcagcaccaccagaagcagctctgggggtagttggctcaggtccagcgcctcttcgggttccggctccggcgcggggacccgggcggcccggcccctggagaccgaggcgcccatggtccccccgccaggcccggctgtggctgcgggagaggaagggtcaaggcgtcagggaccagcagcctccgcggcgcgcagcctctgcctgccctgattctgccagccgcacccccgtcttcaccatccctgggccccgtccccaagtccccatcccccagcccgtccttgatagccccgatatcccggagaccccgcggtctgtgtgtatgccccgaattgcatgcaatcagcccccctcggcggccgcaccgacaccgcaccccaagtcctaccccggggcctggcggcgctcctcgccgggatgccctagctgtgccgcaagctccccacgcccctctgcgtcctttttactcgccggcccctcccctcttactagccagcttcacccacccctgcatcctctttcttactcgccagcccctcccgcctgctccctcccgctctccaaacccaacctgcttcccgcgacggggccaggtgcagccaggagccaaggcctgctgctcacagccgtcccctccagccggccccttgaagtgtccctaattcgttagtagcaatgagacgtctggctctgagcaaccattgttattttggtcaggcttctgagtgggaggcctcgtatccgttaacgtgttaaaaaatttccatcacctttaaggtcgggcgtggttatcttcatttcacaggagaaaacaggctccggctgctaaaaattaatgcaaccaatagtaacaccagccaacttttatggacggttttactgccagccagggtggcaaccccatgaagtaggtgctgttatgccctttacttcacaggtgaaaaaactgagaccagcagaggccaagtggcttgtctatgatcaccagctagtagggatttgaatccagccagcctagctccggaattcctcattttaacctctagatcagctctgtccaataaaaatacaattgtggctgggtgcggtgactcatgcccgtaatcccagcactttgggaggccaaggcaggcggatcgcttgaggtcagaagttcgagaccagcctggccaacatggtgaaaccccgtctctactaaaaatacaaaaattagctgggcgtggtagcacgcgcctgtaatcccagctaatttggaggcttaggcaggagaattgcttgaatccgggagggggaggttgcagtgagcagagattgcaccactgcactccagcctgtgcaaaagagtgagtgagactccgtctcaaaaaacaaacagaaaaaaaaaattgtgaaagttgatcatgtgaattggatccttcttgtcatatccaactaaaacaaagttgagaggccggggggaaaacacttagggcagataccattgctccaagaaagtgattctctgcaagcctggctgttaaaactgcctgttgtaacctggaagcagtctaactggtactgaaaaaacctgccgtgactctaagactagtttttccctctgctgtcacttaccagtcagaacttgccagctccccagaacgttgctagtgtcaatgaactttcttgcaaaacaatacctaacatttctgtttcttataaaaacctctaacctctttgttctttgaaagttctgaagaccgcctggtctgtgtggatgcctcgaatgtcaattcttgcttcccaaataaaacattttattatttttttgagacagagtctcgctctgtcgcccaggctggagggcagtgatgcaatctcgtctcactgcaacctccgcctcatgggttcaagcgattctcctgcctcagcctcccgagtagctgggattacaggcgcatgccaccatgcccagctaatttttgtatttttagtagagacggggtttcaccatgttggccaggatggtctcaaactcccgacctcaggtgatctgcccgcctcagcctcccaaagtgctgggatcgcaggcatgagccaccgcaacaaaacattttaaatcgagagatttgtctctatatctctatattttatttggcttcgacataacgtgagctgtatacatagtttaagacatcaacaaacaaaaccagacatggattcttccccacaaagaacttaccttctagagggagagacatgataaacagttggcataatgagcaaattacgtagtatcagggaaataattaaatataaaacctccaggccgggcatgatggctcacgcctgtaatcccagaactttgggaggctgaggcaggcggatcacttgaggtcaggagtgtgagaccagcctggccaaaatggcgaaactccgtctctactgaaaatacaaaaattagccgggcatggtggcgcatgcctgtgatcccagctactcgggaagctgaggcatgagaatcacttcaacaagggaggcagaggttgcagtgagctgagacctcaccactgcactccagcctaggcgacagagtgagaagctgtcttaaataaataaaataaataaaacctccttttgaccctcttagaatcctctccacaaatgcagaaaagaattaaatgggtcctggcatgggggctcacacctgtaatcccagcactttgggaggccgaggcaggaggatctcttgagcccaggagtttgagaccagcgctggcaacacagtgaaaccccgtctctacaaaaaatttaaaaagtagctgcaaatagtggtgtgcacctgtagtctcagctacttgggaggctgaggtgggaggatggcttgagcctgggaggttgaggctgcagtgagctgtgatcatgccactgcacttcagcctgggctacacatcgagaccctgtctcaaaaaaaaaaaaaaaaaaaaaagaaaaagaaaaagaaaacaagtaaaaaaaagaatgaaacggttgtattagtgtatacacttcaaactagcctgtaatgtgcttctgtcatgatgaacagtaaacataataagtgtgtgtgtgttaaaaagtgattagtgctgtgaaaaattagagcagagaagggaaatggggcataacgaggctgggttgggtggataggagagggagaccctgaattaggagagatggatgaactattatgctggtctaatttcttctcaatatgtatattttcatttttaaaattttgtttcaactggacacggtggctcacacctgtatcccaacactttgggaggccgaggcaggtggatcacctgaggtcaagtgtttgagaccagcttcaccaacatggtaaaactccgtccctactaaaaatacaaaaacctaggtgcagtggcttatgcctgtaatcccagcactgtgggaggccgaggtggcagatcacgaggccaggagttcgagaccagcctggccaatatggtgaaaccccaactctactaaaaataccaaaaaaaaaaaaaaaaaaaattaggtgggcatggtggtgcgcacttgtagtcccagctactcaggaggctaaggcagaagaatcacttgaacccaggaggcacaggttgcagtgagctgagatcccaccattgcactccagcctgggcgacaagagtgaaaatttgtctaaaaaaaactgtttatatatatatatttgagaccaggtctcactctgtcgtagctcactttagcctcaaactcctggagtcaagccatcctcctgccttagcctctggggtagctgggactaaaggagagacaaggtcttgctgttgcccagggtggtctcaaactcctgagctcaagtggtcctctcgcctccacctccccaagtgctgggattataggcatgagcaactgtgcccactaaaactaatatattagttttaatgtaatatataagcagtgggaatcttgttgataatgagatatgatgactcaagtatttgacttttttaaaaacttttttcactttgtcatccaggctggaatgcaatggcttgatctcaaactcctgacctcaggtgatcctcccgccttggcctcccaaagtgctgggattacaggcatgaaccactgcacctggcctgattttttttttaacagttaaaaggtttaaaaagtttgagtaggttggccagggactgtggctgatgcctgtaatcccagcacttttggaggccgaggcaggcagatcacttgaggtcaggagttcgagaccagcctggccaacgtggtgaaaccccatctctacttaaaataaaaaaattagctgggtgtggtggcacacacctatagtcccagctactcaggaggctgaggcaggagaatcgctcaaacctgggaagcggaggttggagtaagttgagattgagccactgcactgtaacctgggtgacagagcaagactccatctcaaaaaaaaaaaaaaaaaaaaaaaaattccaagtaggtcaaaagggcagatactgaaaagtcagtgtccttttccagtccctggttctcctcccaagggcaagactcttggtgtccaccccaaagacaccacacccagacaggattcacccatctctctgagggctgctacctgagagactttatctgcaaataagatgacctttgttcttagtgcagttctgcccttcaccctaccttagcttgtcaccaccatggtccagaagcctcctagcccctatctatttctgtatctcaaaatgctatttaagcttcaaccatctggaccttctttgaatctcatactttgtggggtttctctgtgtgtgcacataatggatttgtgtgccttttctctagttcatttgtctactgtcaagtttatttcagagactcaaattatcaagccttcagagacggtggatggaaagtttcacttgtcccttcacttgttaaaaattttataaagttcttttgagatgaagtctcactctgtcacccagtttggagtgcagtggtgtgatcctggctcactgcagacttgacctcccaggctcaagccatcctcccacctcagcctctcaaagtgctgggattgcaggcatgagtcaggtcactgcagctgtgacctcccagcctcaagtgatcctcccatctcagcctctcgaatacatgggattataggcacagctatagtcccaccatgtctgggtaattttaaaattttttttgcagagatggggtcttgctacaatgtccatccagtctcatctcaaactcttggcctcaagtgatcctcctgccttggtctcccaaagtgctgggattacaggtgtgagccatcacactggccttgtccctatactttatagccagaaaagggctgaggaaagcagaaacagagaacaaaaaaacggattggcactttcaaaattaccttccttgtaatggataaagcagagttgttcttcagttcagcaaaccaggaaatctcttaattcaggagggccagctgtgggttttatggagctgttgcttcagagactccacacagagggggaaatgttctagagatataccaaaccccctggggattccaaatcatcaggcccacatttgtaacaaactcccagaagatgccaaagcctatgctcccaggacgaagcattgagtagctgaatcttacaggaatcaagccaaacatcccttgcatgttgatacacatttttttttttttgagatggagtctcgttctgttgcccaggctggagtgcagtggcacgatctcggctcactgcaacctccgcctcctggcttcaagtgattctccttcctcagcctcccgagtagctgggattgcaggcacacgccaccaggctctgctaacttaaatttctctccttttatttcccctttaccttatagttagggcattttggagctaggttttattatctaagtgtttcatttcaaggtaagaaattatttgctatacatcgggagcactggctctgatgaggttgagcaacactgatgcaaagcaaacgtgagtgggggctgcagtcttctctctctgctaggggtgtgggtgggaagctggggaaagtcctgctggtccagtttgcagaagtagaaatgtcatggacctccgggaacagagaagtgggctgcacgactaattccaagggtgttagaggttccaccaatgcggctttctggactacagctctccctggaggccattgttaacaggattagagtgaggtaggaggcgggactcgactccagaggcgtggcttggacaccagatcagactgaggacttggtagaacagggcggtggaggacagcaggagggtgggaagcagttttatttatttatgtatttatttatttatttgagatggagtctcgctctgttgccgggctggagttggtcggctcactgcaacctccgcctcccaggttcaagcgattttcctacctcagcccctcgagtagctgggactacagtcatgtgccaccacgctcggctaattttttgtgtttttagtagagactgggtttcaccgtgttagccaggatggtctccatctcctgacctcgcaattcgcccgcctcagcctcccaaagttatgggattacaggcgcgagccacggcgcccggccagctttctattattattattattattattattattattattattattattattaagacagagtcttgctctgtcggccaggctggagtgcagtggtacaagctcagctcactccaacctctgcctcccaggtgcaagcgattctcctgcctcagcctcccgagtagctgggattacaggcgcaccccaccacacctgcctaattttgtatttttagtagagacggggtttcaccatgttggccaggctggtctcgaactccagacctcaggtgatccactcacctgggcctcccaaagtgctgggattacaggtgtgagccactgcgctcagccggaaacggctttctatgagacaggcccaccagtgtgccatgtcaatttactatcgccatggcaacaccacgagttactgcccctttccacagcaatgacccaatgattactcctccttccctagaaatttctgcatgaaacgccccttaatctgcatgcaaaattaaaagtgggtataaatatgactgtggaactgccctgggctgctactgcctgcctatgaatagccctgctctgcagtagcgaccaccgagctgtgacactgccacttcaataaagctgtttcttctacctctggattgcccttgaattctttcctgggtaggccgggcgtagtggctcatgccttattcccagcactttgggaggctgaaggggaggtggatcatttgaggtcaggagtttgagaccagcctggccaacatggcgaaaccccatctctactaaacatacaaaaattagccaggcatggtggtgcacacctgtagtcccagctactcaggaggctgagacaggagaatcgcttgaacccaggagatggaggttacagtaagccgagatggcgtcacactgcactccagcctggttgacagagcaagactccatctcaaaaaaaaaaaagaaaaagaaaaccttgacaaatagagccagggaacgccataaagacagagttctcatgtttatacgcctgataacaaaaatgattacaaaagactctacagaaaccataaacttgcccaaagggcattacaactttacacaaaaaatggttctacaaagccctccgtggaagagctgcctgtctgacctcgaacgggcatcaccctcgattttgatctttgtagtcaaggataattatttcaaaacaattatgtactcctcattttttcttgtaagagcctttgtcttcctttaccttcctgaatctgcacatagttcactatggcatgcagattctcattgcagtgctgtattcccaaacaaacatcttttctctctttttttttgagatggaatctggctctgttgcccaggctggagtgcagtggcgcaatctcggctcactgcaacctttgcctccccagttcaagtgattctcctgccttggcctcctgagtggctgggattacaggcgcccaccaccacacccaactatttttttttgtatttttagtagagatgggatttcaccatgttgatcaggctagtcttgaactcctgacctcaggtgatccgcccacctcagcctcccaaagtgctgggattacaggtgtgagccaacgtgcctggtgcaaacatctcttcttttatagaacctctctctgtttgttaattaggttcacactgcagcctcaatctccctgggctcaggtgatcctccagctgagcctcccaagtacctggaactataggtgtgcaccaccatgcctagctaagttttttattttttgcagagacaaagttttgctatgttgcccaggctggtcttgaactcctgggctcaagtgttctgtctgctttggccttctaaattgctaggatataggcatgagtcactgtgcccagctagcttctttttctcttcttcttctttttcttgtgatggagactcgctctgtctcccaggctggagttcagtggcatgatctcagctcactacaacctctacctcctgggttcaagagattttcctgcctcagcctcccaagtagctgggattataggcacccaccaccgtgctgggctaattttcgtatttttagtagagatgcggtttcaccatgttggccagagtggtctcaaactcctgacctcaagtgacccactcacctcagcctcccaaagtgctgggattacaggcatgagccaccatgcccagctccagctggcttcttataattataaaaactaaatattttggagtctattaatacacgaaaattatgggaaaacatgtttgtaaagttattaaatgattttcgtttataaaatactcatatgtgacaggcaatgcaatatttcttgcttcccaggttttcactaaaatttaaggttactgtattagtccgttctcaagttgctatgaataaatacccaagactggataatttataaaggaaagaggtttaattgactcacagttcttcagcatggctgggcaggcctcaagaaacttacaatcatggcaaaaggggaatcaacatgcccctcttcacagggcagcaggagagagaagtgctgagcaaaaggggaaaagccccttataaaaccatcaggtcttggccaggcgtggtggctcatggctgtaatcccagcactttgggaggccgaggcaggcagatcacttgaggtcaggagttcgagaccaacctggccaacatggtgaaaccctgtccctattaaaaatacaaaaatgagccaggcatggtgggacacacctgtaatcccagctacttgggaggctgaggcaggagaattgcttgaacccaggagacagaggttgcagtgagccaagactttgccattgcactacagcctgggtaacaggtgatagagccagactcctccaaaaacaacagcaacaacaacaaaaggtgaaagcatttgctttttctcctcacttgattcctccaaaatctggaaactcttcgtgagtattcttatttttatttacataagttcagaaaaagtctgccctttctttataagcaagatataatagaaaacactggctatatcaccaaggctttgactgaagtgtcatattttattttaattaattaattaattaatttatttattgagaccaagtttcactctgttgcccaggctggagtgcagtggcacgatctcagctcactgcaacctctgcctcccaggttcaagtgattgtcctgccttagcctcccgagtgctgggatcactggtgtgcaccaccatgcccagctaatttttttttttttttgtatttttagtagagacagggtttcaccatgttggccaggctggtctcgagctcctgacctcagatgatccactcaccttggcctcccagagtgctgtggttacaggtgtgagccaccatgcctggcctgaagtattatattttaaaatatacataaatgcctggcttcaagagttcccagtcttacaatgaatgagtaaaaatggcccctttctggcaggcccaagaaccttaagaacctgttggtaaaatctaaagtctgccttggtttggcttctgagcctcaagaggtttctaaatctgagattcctatatgataaatgtggagagaaaaagttacatttctaaagaaaaactataatatacctattaatagattgcagccctgtgcactgtttttaagttcttgttatctacctatagactggacgagttcctgaattctcctgacttcctccaatatattgctacaactctctgactaaaagcaacggctggatgggcgaggtggctcacgcctgtaatcccagcgttttgggaggccgaggtgggcagatcacttgatattgggagttcgagaccagcctggccaacacagtgaaaccccatctctaataaaaatacaaaaattacccaggcttggtggcatgtacctgtagacccagctattcgggaggctgagacacgagaactgcttgaacctggaaggtggaggttgcagtgagctgagattgcgctgctgcactccagcctgggtaacagaaaaaattctgtctaaataaataaataaataaagtaaaagctgctctgtttccaaagccctatacgctgaaatgagaccaattttaaggaacaaactttgtgcccaatgtatgggccacacaaaagctcaccaaactgtctgacatcatgaccaaagacacacaaagtgaaaatcagaagttgatgttttcacactgcagacagcttttcccaagacatttggaagaagactaactcataataagatttgtaccccctcaatgctatctttttcatttggcaggataatgatgtagttgaaatttcatgaccaatagcttccattggcaacttaacaaaacctaacttaagaaatcctttagtatccattggttaactaagacatgtctgcgctattgctaatactacatgctgtacctgtagtacaggccagttcttccgggaaaagttgagatccatatacataaaagaagaaaacagatcacttggttacagttggtctcacctaatttcctaaggccttttgattcattcaattcattctgtaagcctatgaagttgtctgaaagcattatgaagagtggaattttcatattactactaattttactttgtatttctccattttaaaaccctgtatgtgtaattcgagcactttgtggggctgaggtgggaagattgcctgaggccaggagttcgagaccagcttaagcgacacagccaggccccatcgctagaaagaaaaaagaaaattagctaggtatagtggcatgggcctgtagtcctggctacctggcaggtgagcaggaggatcacttgggcccaggagttggatgctgcagtgagctaggatcataccactgcactccagcttgggcaacaaagcaagatcctgtgtctaaaaaacaaaacacaaaaccaaacaaaacaactttgtatgttgttaaatttttgcattaagtacaactcctaacaaaataatgttggcctaacattttgagatgttaataaaagactacagaacagataaaactgaacttaataacggacaccatgaaaacttagtctgagagccactcccgtcacacttcccttgttgttcaaatatgttgtttttttcagttccttctcaggctttagattaaaagggttttgaggctgggcgcagtggctcatgtctgtaatcccagcactttgggaggccgaagcgggcggaccgcttgaggtcaggagttcgagaccagcctggccaacatggtgaaaccccatctctactaaaattgcaaaaattagccaggtgtggtgatgtgctcctgtaatcccagctacacaaggctgaggcaggagcatcgcttgaacctgggtgatggaggttgcagtgagccaagattacgcgactgtactccagcctgggcgacagagtgagtgagactgtctcaaaaaaagaaaaaaaaaaaaaggagaggggttgatagggttttgatactgacttctagacaccagtcactcccccacaatatgcattgagatcagcaattgggacaggtacatcacagcatcaagatacatcaaaacccaaatacaggatgatcaatcagtgatgcttttggagaaagatcttaatcaaaaaggggaaaggtgaaagttgtcagagtcactatggagtcactaatattaagaaaaccctgaaaaacagagctggggaaggccatgaagagagggttctcacacttgtgtggctgattataaaactatcacaaaagactgcaaaaaccacaaccttggccaggcacagaggctcacatctgtaatgccagcactttgggaggctgaggagggaagattgcttgaggccaggagtttgagaccagcctgagcaaaatagcaagaccccctgtctacaaaaaaatataaaaatcagccaggcatggtggcatgtgcctgtagtctcagctagaggcgagaggattgcttgagcccagaaggttgaggctgctgtgagccaagatcatgctactgcactcctgcctgggcaaaagagcaagactctgtctcaaaacacaaaacaaaaagcacataaaacaatgctatacagtgtaataattttggaacaacaatatgtagaaaaaggagaaaataacccaatgtatatcatttatgggagaggagagtcttcccagcaaggctgagctgacctttgaagcaagaacagatgaggcagaaggaaataaggacttttgaagtcattagttctgcccatcaaatatttccagctggcagcaggatgcggtggtgtgtgcctgtaattccaggtacttgggaggctgaggcaaggggatcacttgagcctgtgagttcgagaccagcctcagtaacatagcaagaccccattaaaaaaaaaaaaaaaggaaaaaagaaatcagaagtagaaagtcaggtgcagtggctcactcctgcaatccctgcactttgggaggccaaagcgggtagatcacctaaggtcaggagtttgagaccagcctggccaacacggtgagaccccgtctctactaaaatacaaaacttagccaggtgtggtggcaggcgcctgtaatcccagctacttgggaggctgaggcaggagaatcgcttgaacccaggaggcagaggttgcagtgagcctagatcatgccattgcactccagcccgggtgacaagagcgagactccatctcaaaaaaaaaaaaaaaaatttcttcctgaattaaacgtgggctgtcacctttattcccatagccaggcaatgatttcctgacatggcccgtaactgtcctcacgtggcagccccacacagaagctagttaaaatgaaaccatggccctgcgaggaagtgccatcctccctcacattccacaagcatttgctgagcaccagctttttgccaggctttgggttaggcactggggacacaacagtgaaagagaggggtaaaatgtctgctatccaggaactgatgttctatagcataaaacaggcagtaaggaaggatgtaaataagtagaacctacaagggtggtaagtgctatggaggcagaaagcaaactaagccagggaggtggtaggaagagggggagggagttgtaagtttcaggcagggcacccagggaaggcctctctgagaagctgacgtttgagctgagatctggcggggataaaggattaagccagactgaggtaggagaccagcaggacttgttttctggtcacaatcttgctgaccaaaacaggatctggtccagacgggatgaagtaaagaaactggcaggaaccagccgacccctaggcagcaatccctagctgctctcattgtctattagcataagacactcccaccagagcatgacagtttacaaatgccatggcaacgacctggaagttaccgccccttttctaccaggaagttatctcccatttcacacagttctaaatgacccaccctctcaatttgcattaacccaccccctaatttgcatgtaactgaaagtgggtagaagtgagtgtaaatagttgccaacagctcatatgttgtctactctgggtgcactgcctatgagccggttctgttctgcaaggagcagcactgttctatgaaagattgttgtcaaacaccacgggctcatccttgaattccttcctgggtgaagacaagaaccctcccaggctaagccccaattttgatgctttcctgtccagcatcaagatcactatctggggaaggagtgctcttagaatagagaacagcaagtgcaaagcccatgaggcaggagcaagggacaagaaggccatggggctagagccaaggggagattggtaggaaatgcactttgagaggtgatgggggcagactgtgggggctttgtggtctgtggtaggaacttacttttcctctgagtgagatgcagccatgggagggtttgaagtagggatgttatctgattcaggcattgtgatattgtgatttacaataagatatatgtacaattggctgggcgtggtggctcggtgggaggccgaggcagaaggatcgcttgaggtcaggagttcaagaccagcctggccaacatcgtaaaactccgtctctactaaaaatacaaaaattagctggacatggtggtgtgcacctgtagtcccagctactcgagaggctgaggcaggcgaattgcttgaacctgggaggtggaggtttcagtgagctgagatcatgcctctgcactccagcctgggtgacagagctagactccatctcaagaaaaaaaaaaaaaaaaagaaacatccttatcatatcttgctggacaaaagtccaaggaacaccatgatgatatcctactggaacaagggccagaactgccttatcatgggagcgtcttatcaatatcctgctgggcagcaagccatactgcccagacccctcccacccatacctataaattgccccagcctgtaagcagtgatgggctctggcattaggctggtcccccacttctgtaagttttatgctggacataaagcctgtatttgatgtccagcccccccttctttctgtgtatctttctttaaccctcaccatcgcttcaaaacctaacaaagacgggttctcactattttgccgaggctggtcttgaactcctgagctcagccgatcctcctgccttggcctcccaaagtgctaggattacagcagtgagccacagcacctggcctgaaatttttttaattaattaattattttgtagagccacgatcttgctatgttgcccaggctggtctcaaactcctgacctcaagtgagccgcccgtcttggccttcctaagtgctgggattacaggcatgagccaccacacccagtgagtgtcagaactgaactgaatgagaaaacacccaagtggtgtctgctgtcaaattgcttggtgtgggacagaaaacccccctatacacccagagtccctgaagtattctgtgttgtgagaatacagcaggagaaactggatttgtttttcttgtgtggggggacaggaggaagtaaggaacagagaaagaaggatgctgctcagagacaggtgagacaggagggtggaccagcccaggaccggggcataggagccaggagaagtggctaattctggatagatttgagggtgcccacaggatttgctgaagaattgggcatgggatgctgggccacacagaacacgttcaggatatcaggcgatgttttttgtgaagtccttgtctatagaaacagtttgattgaaagatgtggccaggtgtggtgactcacgcctgtaatcccagcactttgggaggatgaggtgggaggatcctttcaggtcaggagcttgagaccagcctgggcaacatgtagagagcccatctctatttttttaaaaaagggaaaaagcaatttaatttcttttttcttttttgactagagacagggtttagccatgttgcccaggctagtctggaacttctgggctccagggatctgcccaccttggcttcccaaagtgctgggattaccagcaccctaaaaaaaggaaaattttaaaaaaagaaaaatttgttacaaaattcatggacctaagtgaggtatagtgatttatcagtgatagagaataatgcacagagaagaggtacttaggtatttgctttttgttgaacccaccaccgtgaaatccaccaaagcgtccaggtaccatctcctcatgtcccttttttgtcatcctgtgtcattttgggctaatttaatatccctcagcatgcaaaagaggcagcattgctgttacactcaacatccttgcttctgctgatctttttttttttttgagacagagtcttgctctgtcgcccggctggagtgcagtggtgtgatcttggctcactgcaacctccgcctcctgggttcaagtgattctcctgcctcagcctcccaagtagctgggactataggcatgcgccaccatgcccgctaattttggtatttttagtagagacggggtttcaccatgttgaccaggatggtctcgaactcctgacctcaggtgatctgtccacctcagcctcccaaagtgctgggattacaggtatgagccaccgcgcctggccacctctgctgatctctatggctatctgtttaacactggtcacatcgttcctcatgacactgccccaggaggctgcttcatctgttgtgacatccatgaataccggcttctggtgacttcgtcagaggttttcttgggctgagtggatgacaaacacaaatgccaatgccaatctttattcttcttgtcagacagtaatgtgctgatgtcataagaaggcttaaaagggaggcgcattgtattactccgttttcacgctgctgataaagacacacctgagactgggtaatttataaagaaaaagaggtttaatggactgacagttccaagtgtctggggaggcctcacaatcatggtggaaggcaaagagcacgtcttatatggcagcagagaagagagagaataagaaccaagtgaaaggggagaaacccttacaaaaccatcagatccgccgggcacggtggctcacgcctgtaatcccagcactttgggaggccgaggcgggcggatcacgaggtcagaagatcgagatcatcctggcaaacacagtgaaaccccgtctctactaaaaatacaaaaaaattagctgggcgtggtggtaggcgcctgtagtcccagctgctagggaggctgaggcaggagaatggcgtgaacccgggaggcagagcttgcagtgagctgagatcgcgccactgcactccagcctgggtgaaagagcgagactccatctcaaaaaaaaaaaaaaaacccatcagatctcgtgaaacttatgcactaccaagagaacagtatgggagaaaccgcctcgatgattccatcatctcccactgggtccctcccacaacacatgggaatcatgggagctacaattcaagatgagatttgggtggggacacagccaaaccatttcacgcatctcacttaagagcatgaaaacccaatcatcaagtttacgaactacaaaaggatcaaatgcaagtcttttatttatttatttatttatttatttatttttgagatggagttttactctgtcacccagactggagtgcagtggcacgatcttggctcactgcaacctctgcctcccgggttcaaacaattcttctgcctcagtgtcttttaaaaatttttcaaatattttttagcagtggtgaggtcttgttctgttgcccaggccggcctcgaacttctggtctcaagcaatcctccagcctctgcctcccaaagtactgggattacagacgtgagccactgcacccagccaaaagcaagtttttgtttgtttgtttgtttgtctgtttgttttctgagacagagtctcgctctgtcaccaggctggagtgcagtggtgtgatctcggctcactgcaacctctgcctcccaggttcaagtgattctcctgcctcagcctcccatgtagctgggattacaggcgtgcaccaccacgcccggctaattttgtattcttagtagagatggggtttcaccatgttggccagattggtctcaaactcttgacctcatggtctacctgcctcggcctctcaaagtgctgggattacaggtgtgagccaccgcgcctggccccaaaaagttttaaccagagtaatgtgagcaagaacttttctggtcatgttaaatgatcatatttggaatttcctggtggaaatgtagaaccacacaccttccacccaagtctgtctttaggccaccatccccgcattcaaaaagccttttttttcttttttttttagacagggtttcactctgtcacccaggcggagcgatcgcagttcacctaagccttggcctcccaggtttaagcaattctttcacctcagcctcccgagtagctgagactgcaggtgcatgccaccacgcctggctaatttttctgtatttttagtagacatggcgtttccctgtgttggccaggctggtctcaaactcctgacctgaagtgatccacctgcctcggcctcccaaagtgctgggattacaggcatgagccaccacacccagccaagatttttaaaactttttacaattttatttttagagctgaggtctcactatgtcacgcaggctgatctcaaactcctgggctcaagcgatcctcttgcctcagcctcccaaagtgctgggattacaggcgtgagccatcgtgcctggcccctagagtccttcaacactgaccttgtcttagccttcaatatccctgcaacctgtgagaataagcaaagcaaatacagtgaccacgtgtctgtccctcctggagcccagctgtagctgaccggagagcatcgggtgcccatcatgttgtggagtcacggtctcgaaaaccctgggaggggagaggcacaatttgcccattatggagaagaaactggccagttcttcaagagcttgatgtctcttttcctggcagcaggagttacaggccatgaatactagtttctgtgggagaaataaaggaatctttgcagatggcaagggaaaaaaacagctcctttctaaaaggacattgcctgccagggacggtggctcacgcctgtaatcccagtactttgggaggccaaggcaagcagatcgcttgagctcaggagttcaagatcagcctgggcaacatggtaaaatcctatctttacagaaaaatacaaaaattagctgggcatggtggcacacatctgtgatcccagctactgggggaggctgaggcaggaggactgcttgagcccgggaggcagaggttgcagtgggtggagatcaggctgctgcactccagcctgggcaacaaagtgagactctgtctcaaaagaaataacaataataaataaaataaaataaaataaaggggcattgccttattgtaaatccaagtttactaagtaactagcctcagtctaaacactggggaaagtacaattctgagatgataggccgtttagatatgaagtaccagatgacatcctacgtgtatataatctgtattttggctgggcatgctggctcatgcctgtaatcccagcactttgggaggtcgaggcaggtggatcgctggaagccaggagtttgagatcagcctggccaatgtggcaaaaacctgtctctactgaaaacacaaaaattagctgggcatggtggcaagcacctgtaatcccaactacttgggaggctgaggcaggagaatcgcttaaaccctggaggaagaggttgcagtgagccgagatcgcgccactgcactccagcctgggtgacagagcgagactctgtctcaaaaaaaagaaaaaagaaagttgatacatggacccatctacctggctccacgctaagaggtggtcatggaccattgatgacccagtgtcctgaatgtgtcctgtgcccagggtacgtccagaagcttcgtggcagcaccattctggtggccgccagggggcgccatgtgcttgccaggcagcagtcctggaactggggtccagccacagggccccaggaccacgccacagggcaagagtcctagagttcctggtagtttccagctgaacctatgcacacggggtcgttggtggaggtggaactagatctctgcagagcaccctaaaggggagaaacgggacaggcccacacaggtcttggtctgaactgggagtaccctgccctgagagcactgtggcttggctggccccagctgctggagagggacttagaggaaagtgccacacagtgtaggatgcccacttgcctggtccaaggatgctcctggtgggtgtgagagaaacagcaaagtccagcatttccagacttggatttctccaaggtttccagtcatgttgccatttattgggaaggggaatggtgcaggactgggggaaggaataggaaaatcagggcttcattttggggaaactgaggctcagaaaagcccacaggcaccgagcaaggatgtgaaaccatttccctcgtaacccccgggcgacaccgcctgccccagttccacgtgaggttgtaaagcactgatgctgctgaacattttcataaatgacttcatttagtctcatcaacaatgagcattttgatcccatttagggggaacaaagggaggctcagaaagaccttgccgaggccttagatggaggaggtggcagattttagtgtgctctgagtccaggcccactttaggctcacagaaccacctcaacccctttctgccctaggccgggcttttccgagcctccctctgcccacttgcctcctccttccaggagtcagggtactggggggcttcccgcctgcgcccaaggggccatagggcctcattcccatccattcctgcctctgtgccttgctctaacccagctggccacagccccacctggcccaggtgccgccggccctgcttggtccccatacaaaggcctgtgggagaggctgggaaattgccatccacctggggacagtgggaaacagtcatcgtcagcctgtccatatccaggacaccgtgctgcatcctggctcacaatcaggaaccagaaggcagcacggcccccacagggctggcacgggcagcctcactgtggcctgtgccctgggcagtaccaggcagctccatcctgtggtacccaggctgagtccatctcttacgcccacgcccaacctctcagcaaacccaggcagctccaggtgcacaaaatctgcacagcacctgccctttctcgcccgaccatggccaccaccctggccccatccacccctgtctccatctggaccatcactcccatccacagactccctgctccttcccaccccaccctcgcaatctgttccacagccacagggagactgtgaacacctgtgtcactcctccgcccagaaccctcccggggtgccatcctgccctgagtaaagggcaaagtcctcccctacggcccaccaggcctcacatgatctgccccgccccactctgactctgtggcctcccacagcctccttgctcacccagcctggccactgcttattattctgttcccaccacggggactttgcttggctgcccctccccataggtcactccctaccctccttccaatgtttgctcaaatcttgccttcccagccaggcttcccctgaccactgcctttaatactttaaccaccctgcctttttttgaactcctaattttttatttttatttttattttttgagataggatctagctctgttgcccaggctggagtgcagtggcgtgatcatagctcactgcaactttgaactgctaggctcaagggattcctcctgattcaacctcccaagtagctgggactataggtgcacacccagcacttataattgtaatttttaatagagatggggtttcactatgttgcccagtctggtctcaaactcctggcctcaagtgatcatcccaccgcagtctcccaaagtgctgggattgcaggtgtgagccaccacacctggccaccacactgccctttttaccccctttgcctactctgattttcttggaaaccttccatagacttcacagcttcctctcaccatcccactcatccagccactggccatggccaccttccctgttactgtacgcaggctccaggagggctggtcagctcagcctctctgctggagtcctttattagtttcccattgctgctgtaacgaattaccacaaacttggtgccttcaaacacatttattctcttgctgctctggaggccagagtctaaaatcagtttcactgggctggagtcaaaggagcggaaggactgcctgccttctggaggctcgggggagccattcattgcctctcctggcttctggaggctgccagcattccttggcttgtggctgcatcactccaatctctgcctctggagtgattttgccttctcctcttctgtgtgcaacctccctctgcctctaatttataaggacacttgtgacagcatatatggcttaccaggtagtccaggataatctcatctcaaaaccattaacttggccaggcgcggtggctcatgcctgtaatcccagcactttggtgggccgagacagatggatcacctgaggttaggagttcgagaccagcctggccaacatgacgaatccctgtttctactaaaaataccaaaattagccaggtgtggtggtgcgtgcctgtaatcccagctacttgggaggctgaggcaggagaattgctggaacctgggaggtggaggttgctgtgagctgagattgtgccattgcactccatcctgggcgacagagcgagactccatctccaaaaaaaaaaaaaaaaatcattaatttacatctgcaaagacgcttcttttgtataacataacatttataggttccagggattgggttgctgtcttagtctattcaggctgctagaacaaaataccataaactgggaggtttaaaaaatttatttctcacagtagtaaagcctgggacattcaagatcaaggtgctggcagattcgctgtctgataagggccctgcttcctcatagaggaggtcttctccctgtgttcttacagagtggaagaggcaagggctctctctatggcctgttttataagggcactaatcctattcatgtgtactttgccctcttgacccaatcacctcccgcaggtcccacctcctaataccatcaccttgggggttgggatttccatatatgaattttgggggttttttctagagacagggtctctctctgttgcccaggctggagtcacagatcactgcaacctcaacctcccaggctcaagtaatcttcccaccacagcctcccaagtgtctgggacttcaggtgcatcccaccatgcctggctaatttttttgtagagatagggatcttactatgttagccaggctgaccttgaattcctgggctcaggcgatcctcctgccttgccctcccaaggtgctgggattacaggcgtgagccactgctcttggcctcagtatgtgaatttcagaggggatacaaacattgagaccatcgcatacctgaatatatttgggggtcgttattcagcctactgataatcaggtcctgactgatggtggttctaggagaacagagcctcagggaagctcatctgcagctggttctctaatctacagggcttaagagcatcatcaaccctgttgccatggttaagggggcactggtagttcacaacatgcagagacaaaatggtgacttatactgtgacctgtcgtcacctgtcatttacagggtcaggtccattctgcactggtctccctgttgagcaaggacggtggccattgtcagtccaggctccccacttccttgttctttttttttttgatagagtctctctctgtcacccaggctggagtgcagtggcacgatctctgctcactgtaacctccgcctcctgggttcaagtgattctcctacctcagcctcctgagtagttgggattacaggcgcccgccaccacgcccagctaatttttgtatttttagtagagatggggtttcaccatgctttccaggctggtctggaactcctgacctcaggtgatccgcccacctcggcctcccaaagtgctgggataataggcgtgagccactgtgcctggctgcttgttcttatcccttttttttttttttttttgagacaaggtctcgctctgtcactcagagtggagtacagtggcgcgatcatggctcactgcagcttcgaccgcctgggcccaagcaatccttctccctcagcctcctgagtagctgggaccacaggtgcacgccaccacccccgggtaggtttttccaattttttttttttttttaagatggagtctaactctgttgcccaggctggagtgcagtggcacaatcttggctcactgcaacctctgcccccaccaggttcaagtgattctcctgccttagcctcccgagtagctgggattacatgcacatgccaccacgtccagctaattttttgtatttttagtagagacaaggtttcaccacattggccaggttggtcttgaactcctgacctcaggtgatcttcccgcctcggcttcccaaagtgctgagattacaggcgtgagccaccgcacccggccgacttttacaaaattattattattattttgtagagatggggtctttctattttgcccaggctggtcttgaactcctggcctcaagccatcctcccacctcagcctcccagagtgctgggattacaggcatgagccaccacacccagccaacaaggggagccttaagtacagagcaaagtctcctggtagctcaccagccaggtggtggactggtattggggagtccaccccagtggggactcactgaagcagaccagtatgtgggaaaaccatggacatgacccccagatctaagagcagtggacactggggaagaccctctactcccactcaaccctttctccggtaaggacccaagagggcagaggcctaacccagcccccggcgttcatcctgattcatccaatgagtctaatcttctgtggtgtgacttgttcaggaatgggcatccaacctagttctggccaatggggtgcaaggggaggaggatgttctgaaaaagtgtagaaaaaagaggatcacagatctaaggtttgtagtaagagtctgtggtttccagaatgacatggaagaaggaatgagggaggacacctacaagttagatgatggctacaccccaagacttcagaggtgtggactgaaagccacaaaagaaggaagtaaatggtcagataatgcatttcctttaggaatgtaagtcatgaggccagctgaccacggtgaaatcttacattgggaaatagtgtgggctgttgacttgacaatggagccataggttagccgccattttgcagagctatctgtgaaggtgctgatgacactcttgaaaggatcccagtactggtcgaaggtgaagacacaggaatccatcatgtggtgagattctaacttcatccctaactggcggtctacattacgtgtagatctgtttactaaggcagttgatctcttctttggcgtgtctttgaaaggggttttctcattccttatgttaccaaataaaggaggtgtttttattgcactctccaggaaggacaagtggaggaagaacagctgcagtttgtctctgtccctcatgccttccctgggggtgacggtgggggaggacccatggtttagtggaacttattcttgtgcctataaaccagctagagaggagccgccattatttatgtatttatttagagatggagtcttgctctgtcacccaggctggagtgcagtggcgagatcttggctcactgcaacctctgccttctgggcttaagcgattctccttcttcagcctccctcccaagtagctgggattacaggcgtgcgccaacatgacttgctaattttttttttttttgtatttttatttttatttttttttgttttttattattatttttttttaatttatttttttattgataattcttgggtgtttctcacagagggggatttggcagggtcatgggacaatagtggagggaaggtcagcagataaacaagtgaacaaaggtctctggttttcctaggcagaggaccctgcggccttccgcagtgtttgtgtccctgattacttgagattagggattggtgatgactcttaacgagcatgctgccttcaagcatctgtttaacaaagcacatcttgcaccgcccttaatccatttaaccctgagtggacacagcacatgtttttgtatttttagtagagacgtggtttcaccatgttggccaggctggtcttgaactcctggcctcaggtgatcggcccatcgtggcctcccaaagtgttgggattacaggcatgagccactgcacctggccaaggagcctccattttagatggtaagttcaatttgggggtgttgggaagcccgctgcggccacccagctaagcctttaccaacaggctgatatatatttttttaatttttaatttttgtaggtgtacttatttatggggtaaatgaaatgttttgatacaagcatggaatgtataataatcacatcctggagaatggggcatccatcccctcaagcatttatcctttgtgttacaaacaatccaattatactctttcagttatctttaaataggcgagttattattgactataggcgccctgttgtgtgatcaaatagtaggtcttattcattatttctatttttttatacccactaaccatcctctcctccccccaacctccactatccttcccagcctctctatgtccatgagttcaattgttttgatttttaactcccacaaataagtgagaacatgtgatgtttgtctttctgaacctggtttatttcacttaacataatggtctccagttccattcatgttgttacaaatgactagatctcattcttttttatggctaaatagtactccactgtgcatatgtacattttccttatccattcatctgctgatggacacttaggttgcttccaaattttggctactgtgagcagtgctgcaatacacatgtcagtgtagatatttccttaacagatacactgatttccattctatggggtatatacccagcagtgggattgctggatcatatggtagctcaaatttttaggtgttttgtttttttttttttttttgagacagagtctagctctgtccctcaggctcaagtgcagtggtgtgatcttgctcactgcaacctctgcctcccaggttcaactgattcttctgcctcagcctcctgagtagctgggatgacaggcatgcaccatgacgcctggctaatttttgtatttttagtagagacggggtttcaccacattggccaggctggtcttgaactcctgacctcaagggatccacctgctttggcctcccaaagtgttgggattacaggtgtgcgccactgcgcccagcctcaatttttagttttttgaggaacctccaaactgttctccacggtggttgtactaatttacattcccaccaacaatgtacgagggttcccttttcttcacatcattgccagcatttgttattgcctgtcttttggatataaggcactttaattggggtgagatgatatatctcactgtagttttgatttgcatctctctaatgatcagcgatgttgagccccttttcatatgccaataggcggatatttctagctgtctgtgtgattcctgggtctacttctccaaaatcagactggaagcagagaggcagtgtggagagcagataagagtcagggctctgctgccagactgcccgagttcaaatcctggctccacctctggctcactggggggactttgagcatgccactcagtctttctgacctcagtttccccctgtataaaatggggatgataatgctacctatctcatagggttgtggagaggaccaaatgagctagtatggggtatttcatggatccacggaattgggatgggtgttaaaatagatgatctgttgtggtttaatcaacagtggtcttttttgcttccttttttttttttttttttgagatggagtctcactcttgttgcccaggctgcagtacagtggcgcaatcttggctcactgcagcctctgcctcctgggttcaagcaattttcctgcctcagcctcctgagtagctgggattacaggcatgtgccaccacgcccggctaattttgtatttttagtaaagatggggtttctccatgttggtcaggctggtctcgaactcctgacctcaggtgatccacctgcctccgcctctcaaagtgttgggattacaggcgtgagccactgcgcctggccttttttatttttatttttattttttttttagatagagtcttcctctgtcgcccaggctagagtgcagtggcacgatctcggctcactgcaacctccgccttccgggttcaagtaatcctcccgcctcagtctcctgagtagctgagattacaggtgtctgccaccatgcccagctaatttttgtctttttagtagagacagggtttcaccatgttggtcagggtggtctcaaactcctggcctcaggtgatccacctgcctcggcctcccaaagtgttgggattgcaggtgtgagccactgcacctggctgctttatttttttctttctaagatggctcttatgcacagagcaccttagagttggtgtaatagggcacatgggaaggctaagagcagtgcttgtagcacagaaagtagcatgtgactgttgatcagtatcattactgttaattcccctcaaacaccccacagctccctccgctctcttgagggagtcccgcagaaagacagcttctctctctctctcattctgtctttctctctcccttgcctctgctgaactcaaacaagaaagcgtgttgcagtggtgttggcagcctttcacttacaaccttatcttcaggatgaagataaaactagatagagattgcagagcagagaaacgggaacccaggatgccaatgacatcagtgagcatctggacagactacacatcttctgtgggtttcctgttacttgcagcccaaagcattcatatgtggagtgtgtgtgtgtgtgtgtgtgtgtgtgtgtgtgtgtgtgtgtgaaatgttctcctgaaagcactggggggtttctgagacttctgaacatgggctatctttactagtgttttttcaggcctgtctcccactcctgagccccctaagccagtattctctccaacaaggcctctttccctaccccatgctacagatctctgggaagctgagcccagtggtctgattgacaggtgactccaagatgttgcttgttcaaagatgctgagatctctctggaaattgtcactaatttccacttaggacagcatttcccaaagagtggaatatgctagtgagatttgacacatttaggtggtacacaaaacatttgttatgtgaatagctctgtgttttctttttttcttttttagagatagggtctcacactgtcacccaagcttgagtgcagtggtgcaatcttggctcactgtagcctcggcctcctgggctcaagtgatcctcccacctcagcctcccaagtagcttggactacaggcacacgccacagtgcccagctaattaaaaaacattttttttttttgtagtgatggggtcttgctatgttacccaggctggtcttgaactcctggcttccatcaatcctcctgccttggccttccaacatgctggaattacaggcatgagccactacacccagcccagctctgggtgtacaggcgcctgggtgttttttttttttttttttttttttgagacagagtttcactcttgttgcccaggctggagagcaatagctcgatctcagctcactgcaacctctgcctctgggttcaagagattctcctgcctcagcctcctgaatagctgggattacaggcgcccgccaccatgccggctaattttttgtatttttagtagagatgggctttcaccatgttggccaggctggtctcgaactccagacctcaggtgatccactcgcctcaacctcccaaagtgctgggattacagtcgtgagccaccacgcccagccctgtattttctttgaaaaagtattaaatgattttggttttctctttatagtagtgatacaatgttgccttcaaaatgaattaagcctaaacattatttaaagaaattaagtaaataagagtttaagtagtccttgaataggacaaaaaaatctcaagtggtatgtgagccactgaagtttgggtagcttggttttagagaaaccctgcactattttttttccccctggcgacggtccccagtttgtctggcctgggggtgagactcgctcttctttcttgggtttgcttttcaaatgcacagagcagggcactcagccgacaacatgagggctgacggttgtcaccaagcagcgatgtctctccactgggagcctttaaaaaggctacacttggcccggcgtggtggctcacgcctgtaatcccagcactttgggaggctgaagggggcagatcacctgaggtcaggagttcgagaccagcctgaccaacatggagaaaccccgtcactaaaaatacaaaattagccgggcatggaggcgcatgcctgtaatcccagctactcgggaggctgaggcaggagaatcgcttgaacctgggaggcggaggttgcagtgagcccagatcgcgccattgcactctagcctgggaagagcaaaactccgtctaaaaaaattttaaaaaggctacacttgcagtgatttaaaataaactgaggcttttaggaaatctctgctgaagcggctcctgcttcagcagaaacacctgtgtgttttaatgctgaggatgggcggagtatggagccttgggcagagtacggagccttcggtgaaactgcggactgggagagacctggaccagttacaagctgtgtaatatcagacaagctacctgtatttgtctgttctcgtattgctataaagaaatacctgagaggcccagcgtggtggctcacgcttgtaatcccagcacttttgaggccgaggtgggcagatcatttgaggacatgagtttgagaccagcctgaccaacatagtgaaaccccgtctctactaaaaatacaaaaaaaaaaaaaaaaaaaattagccaggcatggtagcgggcgcctgcactcccagctacttggaaggctgaggcaggagaatcacttgaacccaggaggtggaggttgcagtgagccgagatcgcaccactgcactccagcctgggtggcagagtgactctgtttcaaaaaaaaaaaggaagaaatgtgcccaggccaggcgtggtggctcacatgtgtaatcccagcattttgggaggctgaggcaggagaatctcttgatccagggagattgaggttgcagtgagctgagatcgagccactgtactccagcctgggcaacagagtgagactctgtcaaaaaaaaagaaaagaaaagaaagaaagaataaataaataaataaatatgccctggggcggacgcagtgactcatgactgtaatcccagcactttgggaggccacggtgggaggatcacttgagcccaggagtttgagattacagtgagccatgatcatgccactgcactccagcctgggtgacagggcgagaccctgtctcaaaacaaaaaaacaaaattacctaagcccaacatggaactccattatactcataaccaggtttgttgtcgtcgttgttagagacagggtctcgctccatcacccaggctggagtgcagtggtgtgatcatggctcactgtaatctcaaactcctgggctcaagcgatcctcccaactcagcctcccaaactgttgtgattacaggcatgagccaccgcaccgggcccgtaaacagttttaaatttttcaggaatgcaactactgggtagaaccaggaatgtgtgttcattgttcaccatttggtgccagagtcacaaagctgtgtctgtctttatttgtggctctccagctggcattcacaaagcttctgcccctggcacacccctaaccctttattatgttttatagcttagttaagtctgagctttttgaacattttactataaattactttccgcttattctttcttcattataataaggacattatcttgattaaaaattttattttgtatgtgggtgggttatattatccataaactttatttcagggtggtaaagggagcatataaaatatttattataacactaatctatgctaaaaatcaaaacagccgttacccctgggggtggggggcgggcggtaagaggattgactgcaaaagggcacaaaggaatgttctggagagaaatgttctctgccttgattgaggtggtgtacaattgtcaaaactcatccaactgcacacttaaagtgggcgcgttttaccgtaattataatgtaaattatacctcactcgagtggaataaaacaaattttaaaatatctgcatagaaactttaaaagtatagatttggccaagcatggtggctcaggcctgtaatcccagcactttgggagggcaaggtgggtggatcacctgaggtcaggagttcaagaccagaccagcctggccaacatggagaaaccccacctgtactaaaaatacaaaattagccaggcgtggtggcgggtgcctgtaatcccagctgtctgggaagctaagacacaagaagcgcttgaactcgggaagcagaggttgcagtgagccaagatcttgccactgcactccagcctgggcaacagagcaagaccctgtctcaaaattaacaaaaaacatagacttgttctagaaagcagatagagatctgctaaggccttgaaatcaattaagtggatttagaccagcatttaaaaacaaaagcaaaaacagaagagattagaggctggcactgcccacattgtgagtcttgcacaagttatataaaacttttttttttttgagacagagtctcactctgtcacccaggctggagtgcagtggcatgatctcagctcactgcaacctccgcctcctgggttcaagcaattctcccacctcaccctcccgagtagctgggattacagatgcgtgccaccatgcccggctaaatttttttgtacttttagtagagacggggtttcaccatgttggccaggcaggtcttgaacccctgacctcaagtgatccacctgccttggcctcccaaagtcctgggattacaggcgtgagccaccgcaactggccaagttttgtaaactttaattatgtaatagatatacatatatgcatgtgtgctaggttgtgatataagtacatgtcttattttgaactgtagtcaaaaacattgaaaaaactaaaatggtacttgccagactttcaaacatagatctcttacctcttttgcagcaatgtctgagatatgattagatcatcatgattttatccgagaagactgacagtcagaagcttgtgtttgaaagaggattaaacgtggtagagtgagttctaataacagaaatcacagggatggggaataaaaagagtgttggggtgagagctgaatgctcatcgttcataatgatgtctatatttgatcaatccagaattaacatgacaaacctggaaaaatacttccaaattgcatcacatgcaaagggctaattttaatagatttcccacaaatgaataagaaaaggaacaatctcatcaggggaaaaaatacacagagaatgtgaacaaatagttcatagaaaaggaaataagaatggctcttaagtccgggcgccgtggctcacgcctgtaactccagcactttgggaggctgaggtgagtggatcacttgaggtcaggagttcgagaccagcctggccaacataatgaaaccctgtctccactaaaaatacaaaaattagtcgggcgtggtggtgggggtctgtaatcccagctactcgggaggctgagacaggagaatcgcttgaactcaggaggcagaggttgcagtgagccgagatcgcaccactgcattccagcctgggcaacagagcgagaccgtctttttttttttttttttttctgagacggagtctcgctctgtcacccaagctggagtgcagtggtgcgatctcagctcactgcaagctccacctcccgggttcacgccattctcctgcctcagcctcccgagtagctgggactacaggcgcctgccaccgcgcctggctaattttttgtatttttagtagagacggggtttcaccatgttagccaggatggtctcgatctcctgacctcgtgattcacccgcctcggcctcccaaagtgctgggattacaggtgtgagccaccatgcccggctgccacacacttttaaatgaccagatctcttgagaactcactcactaccaaggggatggtgctcacccattcatgaaggatccaccccatgatccaatcacctcccaccaggctccacctccaatgttggaaattgcaattcaacatgagattggtggtgatagcacctagactatatcggccacggtacctagagcataacgtgcagtgatgaaaaacaaatccaacagcttgtcaaggtcatcagtgacttccatggtgccaaatccaaagttcaattcttttttttttttttttttgagatgaagtccctctctgtcaccctctctgtccaggctggagtgcagtggtacaatctcagctcactgcaaccttggcctcctgggttcaagcgattctgctgcctcagtctcctctgtagctgggactacaggcatgtgccaccacacctggctaatttttgtatttttagtagagatggggtttcaccgtgttggccaggctggtctcaaactcctgacctcaagtgatccgcccacctcagcctctcaaactgctgggattacaggcatgagccaccgcacccagcctcaattcttattttcttttctttctttttttttttttgagacagtcttactcttgtcacccaggctggagtgcagtggccaatctcggctcactgcaacttccacctcctgggttaaaaagattctcctgcctcagcctcccaggtagctgggattacaggcacccgccaccactcccggctgagggcctcgtattataagaatatttgtgattgcatttggagcctacatggattatccaggatcatcttcccattttaatattcttttttttttgagatggagtttcgctcttgttgcccaggctagagtgcaatgacacgatctcagctcactgcaacctctgcctccagggttcaagtgattctcctgcctcagcctcctgagtagctggcatgtccgcaatttattccttctgatgggttcttggtcttgctgacttcaagaatgaagccatggaccttccttcggggtgagtgttacagctctttaagacggtgtgtctgaagtttgttccttcagatgttcacatgtgtctggagttccttccggtgggctcatggtctcactgacttcaggagtaaaaccgcaggccttcacagtgagtgttacagctcttaaaggtagtgtggacccaaagaatgagcagcagcaagatttattgtgaagagccagagaacaaagcctccactgtgtggaaaaggaccagagcaggttgccactgctggctccagtggccagcttttattcccttatttggccccgcccacatcctgctgatttgtccattttacagagtgctgattggtccattttgcagagtgctgattggtccattttatagagtgctgattggtgcgtttacaatcctttagctagacacagagtgctgattggtgtgtttttacagagtgctgattggtgcatttacaatcctttaactagacacagagcgctgattggtgcgtttacaatcgtttagctagacagaaaagtactccaagtccccactcgacccaggaagtccagctggcttcacctctcactgggattacaggcatgtgccaccacacccagctaattttgtatttttagtagagatggagtttctccatgttggtcaggctggtctcaaactcccgacctcaggtgatccacccacctcagcctcccaaagtactgggattacagacatgagccaccacccccagcctctgtttcttttttttgggcaccagtaatcccagctacttgggaggctgaggcaggagaatcacttgaacccaggaggcagaggttacagtgagccaagatggcaccactgcactccagcctgggcaacagagcgagactctgtctcaaaaaaaaaaaaaaaaaaaaagagagaaaaaaacctgagggtgctgttatagaaggtgcaaatgtgcaaatggccactgtgaacagccagtggaccctgctgcacctttcctcccctcccatcaacctcttttgtgcctccccctccgtgtaccaccttctctgtcaccaaccctggcctcacaactctctcctttgccactatcatcaacaaacaaacaaacaacaacaacaaaaacctcagacttctcaagaacaatactgcaaacaagatgagagaaaaatgcctttaaaattctgaaacaaatggagtttggtccctgaattctgtggccagtcaactatcaatcaagtcagaggagagtttgaagacattttcagacgtgtaaagtctgaaacgtttacctcccatgaccttgctcaagaagctccaggatggccaggcacggtggctcacgcctgtaatcccagcactttgggaggctgaggcgcgtggatcacgaggtcagaagttcgagaccagcctgaccgacatggtgaaaccccatctctcctaaaaatacaaaaattatttgggcatggtggtgtgtgcctgtgataccagctactcgggaggctgaggcaggagaatcgcttaaacctgggaggcggaggttgcagtgagccgagatcgcgccactgcactccagcctgggcgacagagcaagactccatctcacaaaaaaaaaaagaagaaaagcttcaggatgcactcaactgaaatgagagcaccaccaagaaaaaggggagcactgagatccaggacacaggggacctgacataggagagaagtgaagaggcacctcaggatggcagtaaaggaggtcccagcatggcagcagggcaccacagtctgagggcaggccgggtatggtgttgtgtgcctgtgatcccagctactggggaggccgtggcaagaggatcacttcaacccaggagctcgaggctgcagtgagccatgatcatgccactgcactctagcctgggtgacagacagagaccctttctctaatatagacataaaaatattatataaaaataaatatataatatttctattatataaaaattatttctacatatttctataattatataatatacaaattatttatttatttatattatataaaaataaaatagaaaaggttagagggcaacaagtccagataggaccgtgtgactcatgaggccaatgtgggggcaatcatcgccagcatgccaactgccattgtactgttttttttgttttttggttttttttgagacagtgtctcactctgttgcccacgctggagtgcagtggtataatgatctcagctcactgcagccttgacctcctgggctcaaatgatcgtcccacctcagcctcccaagtagctgggatgacaggtgcacaccaccacacctggctagtttttgtatttttttgtagagacggggtttcaccgtgtcacccaggctgatctcgaactcctgagctcaagcaatctgcccaccttgcactgtggcctcccaaagtgctgagattgcagcttgagccactgcacccggcctttgttttgttttttaagttgaggagagtatggctgggtgaacatgaaccacattcttcctttctttttaaccagagacagggtctcactacatcacccaagctgctcttgaactcctgggctcaagagatcctcccacctcagcctcccaaagtgctgggagccaccacacccggctcacattcctgtctatacttgacttgccttgaccatggcagagagcctgttctccctgcgagacctgccatggaccatggcagagagcctgttctccctgagtgacctgccatggacccaggggtatactcgtttccctctagtaactgtgctgctgggcccacgcctgagagcctgtggagggctggggtgttcctggaggtaggatacacagagctgaccacactcctgctgaccatgcacagcgtgacccacgcttcagccctgacagatcccccagttggtggtgagtcatgtgccctctaggactcaactcctgttctcacccactgaactcacgaggaaggattagtgtagaccctcagggaagatcacaccagatttgatcttgatatgacccagctcatccttcacacagcaggggccaggctgccctttcctcacacagaaggatgagccttgctctccagtgggtttttatttatttatttacagacaggatctaccaaggctggagtgcagtggtgagatcttggctcactgcaacctctgcctccctcccaggctcaagtgatcctcccatctcagctttctgaatagctgggaccacgggcacacaccaccacacctggctaatttttgtattttttgtagagacgaggtttagccatgttggccaggctggtctcaaactcctgggctcaagcgatcggcccgcctcggcctcccaaagtgctgggattacaggcgtgagccactgcgtccagcctaataagatattttttaaggcaattttttgggggggacagggtcttgctccgttgcccaggctggagtgcagtggcatgatcacagctcactgcagtctcctgggatcaagtgatcctctcacctcagcctcccgagcacacccccgtaggactttaaaatcttccaacactcctcaatgtgactacagtggaaaatggtgtacccaacaatggtacaataaatagttggggccaggcatggtggctcacacctgtaatcccagcactttgggaggccgaggtgggcagatcatttgaggtcaggagttcaagagcagcctggccaacatggtaaaaccctgtctctactaaaaaaaaaaaaaaaaaaagtccgggtgcagtggctcacgcctgtaatcccagcactttgggaggccgaggcaggtggttcacgaggtcaggagatcgagaccatcctggctaacaaggtgaaaccccgtctctactaaaaaatacaaaaaaaaattagccgggcatggtggcgggcacctgtaggcccagctacttgggaggctgaggcagcagaatggcatgaacccgggaggtggagcttgcagtgagccgtaatcgcgccactgcactccagcctgggcaacagagtgagactccgtctcaaaaaacaaaaaacaaaaattatccaggcatggtgtcatgtgcctgtattcccagctacttggaaggctgaggcaggagaatcacttgaacccaagtagcagaggttgcagtgagccaagatcacaccactgtgctccagcctaggcgacagagcaagactctgtcaaaaaaaaaaaaataataataaaataaaaataaataaatagttgggccaatatttataagagctcatgtttgtttgagggtttagtctgtccctggcctcaattccggattttatggaactgttatgtccacctgatgatacagtgatgcttggaggccacgtgcagtggctcacgcctataatcccagcacgctgggagtccaaggcaggtggatcgcttcagcccaggagtttgagaccagcctggtcagcaaggcgagactgtgtctacaaaaaatttttaaaaatcaggtgggtgaggtggtgtgaaactgtagtctcagctactagggaggttgaagtgggaagatcacttgagtccaggagttcgaggctgcagtgagctatgatcatgacactgcactgcagcctaggcaacagaatgagaccctgtcttaaaaaacaaaatacatggccaggaagggtggctaacgcctgtaatcctagcactttgagaggccaagacaggtggatcacctgaggtcgggacttcgagaccagcctgaccaacatggagaaactccgtcttgactaaaaatgcaaaattagctgggcgtggtggtgcatgcctgtaatcccagctactcaggaggctgaggcaggagaattgcttgaaccccggaggcggagattgcagtgagccaacattgcgccattgcactccagcctgggcaacaagagcaaaacttcatcttaaaaaaaaaaaaaagaaaagaaaaaaagacaaaaacaaaaccatgctgggagatgacacaggacctgaggcctgaaatccaggatgagatggcagagggatgaatcggagacagtggggcctggtggttaaggccaagtgtgcagaaaggaatgaatctcaggttttttgtttgtttgtttgtttgttttttgacacagagtcttgctctgttgcccaggctggagtgcaatggtgcaatctcagcttactgcaacttccacatcccaggttcaagagattctcttgtctcagcttcctgagtagctgggaacacaggcgtccatcactatgcctggctaatttttgtatttttagtagagacagagtttcaccatgttggccaggctggtctcgaactcctgacctcaggcgatccacccgccttggcctcccaaagtgctgggattacaggcatgagccaccgcacctggcttagctattcttcttactgacagtgtgatgtcaggtaagtgagctcactcctctgaacctcagtttcctcttctgtaatacaaaatgggaccatgtgaagtggtgaggaatccatgcaatcatacacggttcacaggaagcctccagtgaactggctgtggctgtgattatgaggtgaagtgtggggtgggctgtcctgggtccgtcacaggaagcctccacatctgagagggtgagtcactcttccttcctgctgtaatttgaagcagggtggcatctctcgggaggtgagctgtgccctgggcatgctgctcacctccggtggctcacaggtcccctgacatgtgacatcatatgcagtcaggatgaaatcatggagctcaaagtttgggatgaaaggaaatggttctgctgggaggcggagattgcagtgagccaagattgcaccattgcactccagcctgggcgacagagtaagactcggaaaaatagaaaagaaaaaggaaagaaaaaaagaaggaaagaaggagggaaggaaggaaggagagagagagagaaacgaaagaaggaaggaaggagagagagaggaaggaaggaaggagaaagaaagaaagagaaagaaagaaagaaaagagagagagagaaagaaagagagagagagaaagaaaatgattctgtgctctcctcctcctctcaatctcaaattctagggtccagcacttagccgggcagcaagaatgggttcatgatcccaacagtcattaggattcatccatgtatttgatcatttaataaatccttactgcacacctgctatgtgccagacagccaacatccctgccttcctggagctgttaggaagctggggctgatagctccaggggagatgctagaaaataaacataataaacaagtaaatattacagtctgttagaaggtgatgaatgctatgaaacaaatattagccagggtaagcttagggcaggggtcagcaaactacagtcgggtggccaaatccagcctgtcatttgtttttatacagcctacaacctaagaatggtttttactttttttttttttttaaagacgaagtctctccctgtcacccaggctggagtgcagtggtgtgatcacttctcactgcaacctctgcctcctgatttcaagtgattctcctgcctcagcctcccgagtagctgggattacaggcaaacacctccatgcccagctaatttttgtattttgagtagagacggggtttcaccatgttggccaggctggtctcaaactcctgaactcaggtgatctgcctgtcttggcctcccaaagtgctgggattataggcatgagccaccatgcttggcctagttttaacttaaaaaaacttttttttgagacaggttctcacctctgtcactcaggctggagtacagtggtgcgatcatggctcaccacagcttcaacatcccgggctcagataatcctcccacctcagcctcccaagtagctgggactacacgcgtgcaccaccacaccctgctaattttagtatttttctaagagatggggtcttgctgtattgccccagctggtctcaaacttctggacttaagtgatccttctgcctcagcttcccagagcactgggattacaggcataagcaaccatgcccggttgatttttatgttttttaatggttggaaaacaaaaacaaaagaaaaataatattttctggtgtatgaaaattatatgaattttggctgggcgtggtggctcatgcctgtaatcccagcactttgggaggctgaggcgggcggatcacctgaggtcaggagtttgaaaccagcttggccaacatggtgaaaccccatctctactaaaaatgcaaaaattagcctgatgtgatggtgggcacctgtaatcccagctactcgggaggctgaggcaggagaatcgcttgaacccgggaggcagaggttgcagtgagctgagatcgcgccattgcactccagcctgggcaacaagaaagaaactccatctcaaaaaaaaaagaaaagaaaagaaaagaaaattatatgaatttccaatttcagtgtctgtaagtttgtttgttttttggagatgaggtctcactatgttggccatgttggtcttgaactcttggcctcaagcaatcctcctgcctcgacctaccaaagtgctaggattacaggcatgagccactgcgcctggcctccataaagttttactggaatacacccacactcattgggtcctgtaatgtctgtaggtgcttttgtttgatgacagagtccagtagctgtgacggaggctacgtggcctgcaaatcttaaaatatttaatatctcgccctttaccaaaaaacttttgcagacccctggcttgtggggtggggagtagtgtgtggaggtggattgtaattttaaattagtcaaggggagggctgcctgagaaagtgtcatctgggtaaggcctgaaggaaggagagaaggggctacatgggcacctggggaagaatgttctaggtcgagggaacaggcaataagaaggccctgagaagtggggacatgactaatatgttcaaagaacagtgtagaggccaggtgcagtggctcacacctgtaatcccagcactttgggaggccggcgtgggcggatcacttgaggtcagcagttcaagaccagccttggcaacatggtgaaaccctgcctctactaaaaatacaaaaattagcccggcatggtggcatgcacctgcagtcccagttgctcgggaggctgaggcagaagaatcgcttgaacccaggaagcagaggttgcagtgagctgagattgcaccactgcactccagcctgaacaacagagcaagactccatctcaaaaaaacaaaacaaaacaaaaaacagcgtagaagcctggtgcctgaaccagtgtgggtgaggggcaagtagtaagagataaggaaagagaagtgacggggaggtcacgtggggtctcgtgggccataaggaggtctctggctttcccctgagtgagaggatcaggagggctttgagcaggtgagagacgtgatctgactcaggtgttcacaggacccctctggttacatgtgagggacagactgcagggggtgaggagggggacaggatgggagcgggaagaccagggagggacctgctgagacagcccaggaaggagaggatgggtaggggctgcagaattgggcaggttctggatagattggaaggtggagctgacagcatttcacactggataatattctaagcagggaagagtcactcctaaacgtattcacacacctgtaatcccagcagtttgggaggccaaggcgggtggatcacctgagatcaggagttcgagaccagcctggccaacatgccgaaaccccatctgtactaaaaatacaaaaaattgaccagccatggtggtgcgcacctgtaatcccagctactccataggctgaggcaggagaatcgcttgaacccgggaggcggaggttgcattgagccgagatcatgccatttcactccagcctgggcaacaagagcgaaactctgtctcaaaaaaaaaaaaaaaaaagttttcacacaccaggctttgaaatcagacacaccagggttctagtcctggcttctctgccacacaccagttgtgtgattttaggtaaactgctcaatgtctctagcctcagtttctccatctataaaatgggcttaataagcagcatgcagtatcaatgggattactcatgcagagcattcggcacacagccaagcactccatacagggaagctgcgataacggggatcattcccggggggaccccaagacctgttagccctggtccctgtccccaggtgcatgctaccgttctttctggaagggagctgtccctctaccattcaccttgtctgccccccacccagtcggtgacctgtaggtcacacgacaaggtgcttagccttgctgagcctcagtttcctcgtctgtaaaatgggtccatctgtaaaatttctaaagtctgcattaaagattgtcagggtcattaaatgaacacacagcgtgtcaatcactcgggaatcagttgctgctgtggcttcaccataaaggtcgacaacagcaactacgtggatgtccccaagcattttccccaacatcttattatgaacattttcaaatgcacaggaaaactgaaagacctttacaaggaacacacatatatccgccatatatccaactggattctatcattaacatcttactattcttggccaggcacagtgggtcacgcctgtaatttcagcactctgggaggccaaggtggaaggatcccttgagcctaggagtttgagaccagcctgggcaacatcgcaagtcttcgtctctacaaaaaatacaaaaattagccgggcgtagcagtgtgagcctgtagtcctagctactcaggaggctgaggtgggaggattgcttgagcccgagaagttgaggatgtagtgagctgagatcgcaccgctgtactccagcctggggaacagagcaagatcctgactttaaaaaaaaaaaaagaaaaagaaaaaaccaaacccaaaaagcctacatcttactattctttatatatgtacatatataactatacatatataaattagagatgggggtctcactatgttgcccaggctggtcttgaacccctaggctcacataaccctcctgcctcagcctcccaagtagctaagactgcaggtatgtaccaccgcacccagctaaaaccttgaaatatttctattaagatttttaaggactcggtt
